United States Patent Application Publication US 2019/0144922 A1 - sequence listing, part 2

SEQ ID NO: 1 - DNA, 3964912 bp, Acinetobacter baumannii (residues 1,982,457-3,964,912 of 3,964,912)
agacaccaagtatcgaagcgattttagataaataccgtcaagcagtaaccacaatttctgggcgtgttgttggaacttctactgccgttgtgagccgtacgcaagtcgaaagtggtgaaagcccactaggtgatatgattgccgatgcgcagcaagctgccgctcttcaagcaagtaatcaaggttcggattttacgttaatgaacccgggtggtgtacgtgctgacctactgattaacagcaataaccagattacgtttggtgatatttttgcagttcaacctttcggtaactcgattgtgactttgagcttaaccggtaaacagattagagatgtgcttgaacaacaatggtctggtgcaaatgcaaattcgcctagaattttacagccgtctaaagagttgagttatcaatatgcggcaaatacatctgtttcaccacgagcaagtaacatcatggttgctggttcaccattagttgacactaaagtatatcgcgtgacggtaaatagtttcttggcagatggtggtgacaactttacggtattaaaagaaggccaaaaccgtgtcggtggtggtcaagatatcgatgcgcttgaaagctatgttgctaagaactcaccgttaattattccggctacgactcgtattaaagtcattaaataactcatttaagaatgcataaaggacagtatgatgctgtcctttatttttataacagtttaaaagatttttattcagtataaagattgagttcaacactactaatgtcgactccggtgtttgcaaaaataatatccgtaacctcatgaagtaattctttaactttctcattttcaaagttcaaggcttcagaggttttgagcgaaatgaggttacagctcatcttgtcttttctaagcttataaatacttttactttttcctaaaaacacccttttgatgattttacggttttcaaactcagataaaattcgataaatggtacctaacgtaattttatgttcatttttaatttgcgcatagatacttaccgcgcttaagccttgtgggttctgatttaaaatctcaaaaacttgtaccctcgatttttttatcggtaatccatttaataatgattttgatattgtcgtcatcttactgaaccttaatgtctagaaatataggaattttttaaaattattttgactatatttacctgaaaattatggaaatgatttgatctataaattagaacttactaccctataaataagctccgagctaattattacgttttaaaataactcccatattatccctctctttgctttttacatgtacgcactttgcgaatagatgcaatcttgaactgaaccatatggcgaccctcttcattaatatcactcttcaacattattttatataatggttaacatatgataattattatcatttgtgtttaacggtgtatcatatacacataagttttaatattcaatattaagtaattatctaatacataatgataaccattatattttattgattaaataatgatgaattgcatccatcctctattataagtattcatttcgacccatataaaaagcagatcaatgacctgctctttatatcttaaatacagaaagttaaatgatttttattctagaggtagtgcatcttattcttgtatccatgcttggattacttgttgtgttgtcataacttgagcacatcgtgtactggcatattttaatgccatatcgtgctcttctctactaaagtcagccagcgcatcaccacataaaaatggctgtatgtttagcataaatgcttccgcagcactcattagacaaccaatatgtgcatatacaccacagataatcagttgatcgcgaccagagtctcgcatgagttgttcgagcggagaaaatttaaaaacactatatctccacttagtaagcaccgtatcatttttttgaggtgaaattttcggaaaaatctgtgtgatgcttggctcatcctttaaaccaggcccccaaaagtcggttaataactgccgatattcaggtgactggttgccaggttgtgctgtataaacaacgggaatattagactggcgagcagcatcaattaatgccttagtgttttgaattagttctggaataggttcttgggttagatcatagaaatctaaaaaatattgctgcatatcatgaaccaataaaacagcacgactggtatgcaatggccaatttgttttgtttggagtaaattcgtgcgcttggggcatgctgtaacttgcaatctttggaatactcattggtattttccttttctatctttaaaaatatttgttctttaatttcagtgtattgttgtgctgaagtaagctttaaaccccaagtgtagctcctccatctaccactatttcttgcattgtaatttgggccgctcggtccgaaagtaaaaagctcacggtattggcaatatcatctggttgcgcgagttttcttaatggaattcctgttcggtactggcttaaatcaccatcaattactgcaggtggaggtgcattatctgtccagagttgttgctgcatttgagtgagagtagatccaggtgaaacgatattcagtctgacttgataaggtgcgatttcaagtgccagattgcgacaaaaatgacttagtgcagccttagtggtggcgtacataccaagttgcatacgtggcatacgcgcactatttgaactaatagtgacaatgctaccccgcctttttgcacaaaaatgtttagcaacttgttggctgatcgcgataggcgccatgacattgaccgcaaaaagtgtttcccaatcttccgtttttgcttcaagcatggagcgcataattaatactcctgctgcatttactaaccccgtaatttcgtatttttctaacagctctgaaattaaagtttgtgtttcttgttgatgggtaatgtcttgtgagatgccttgccattgtgaagattgatctgacgtcattgttttactgatatcccattgttcaggatttttttgacagtcaataccaataacatgatacccctgatctagtagttgcttggcgatagccgctcctatccctcttgcagcacctgtgaccacgatggtagagcgcatgtgaatactccaatttatattataaagaaatctataaatataattgcaaataattatcattcttatcaatagcaaatggatataaaagttcaaattatgatctgatacaaatgagttacagcttaaaattacaagctaagacattgttttataattagtttataaaatttaaaggtcaagaatattttgttattaataatcattttcaataagacaggttttgatttattcggctaaaatcagatttatggtttatcaaaactagtaactttttaggattcgatctcccgcaggctcagaatgagttctctataactccgactctcgtaagtttggaaatgcgtataaaaaatgaaaaattataaaatccacattgtttcggtcagttgtttaatctcttgaatatcatgacttacataaatcatcggaattttaatttcctcttttaccttttgaaaaaaaggaataatttcagctttatgattcgcatctaatgctgataaaggttcatcaagcagtaacagcttaggcgaatataataatgctcgacctagtgccacgcgctgcttttccccacctgagagtttgataggcatacgttgtaataaatgccctaactttaataactcaataatgtaatctgcttcaaattgacgttcttgttgggaaagatgctgaaaaccaaataataaattttgcttgactgttttatgcggaaaaagctgagcatcttgaaaaaccaatccaacatgccgtttttgcgtgctgacattaattttttgatttgaatcaaaccacgtttgatcctgtattttaataagcccactacgcggagtgttcagccctgcaatggcatgtaaaatggacgttttacctgacccagaggcaccaaatagcccaataacagaagcatctgactggaaactaggttcaatatgaaactggcccatgtgtagctgaaaacggcattcaatcaacataattttaccgtcctaaccgcttcttttgataacgatgaaaccactgggcaaaccatagcgctaaaaaagctacacttaacgataaaacaataagcctttgaatagcagcttctgtatcgggttgttgcattaagctatacatggctagaggcaaagtccgtgtttcatttgaaatattacccacaaaagtaatggtggccccaaactctcctaaactacggcaaaaacataaaatagcaccaattaaaatgccactgctggcaagaggcaaagtgacatgaaaaaatgcccctaaagatgaggcacctaatgtctttgctgccatttctaaacgctgatcgaccagttcaatcgctagacgaatagattgcaccaataacgggaaacccatcactgccgaagcaagaacggcgcctttccagttaaatgcaaaatcaattccgagcggtgccaaatattgtccaataatgccgcggctcccaaaaacttgtaaaagcaaataaccaggtacaactggcggtaacaccaaaggtaaaaacaccaatgtttcaatgaatgacttaccccaaaactctttacgtgccaaaaaccatcccacacaaattgcaggaataatactgaccacaagacaacttgctgcaaccttacaagaaagttgcagaacgctgagctcttctggggttagagaaaacatcatggcttgactggagccaacacgctaaagccatattttttaaaaacagctttggcttgattgctttgtaaaaattgatagaactttgttgagttcggattctttttaatcaaccctaaaggataaataattggtgaatgtgtattttccggaaatatgccagctaccttcacgtctttgctaatcgcagcatcggttgcatagacaataccgacctgacattcaccacgcgcaacaaagtttaaagcagctcgaacatcttctgtttcaactaactttggctcaatacgactccaccaacctaaattagtaaaagcttgtttggcatatttgcctacaggcacacttttggtatctcctgtacaaatctttcctgtaaacactctattgggatcggtcgttttatctagttttatgtttaatgattgccctttaggggtaattagaaccaaacgattacctaataaatttatacggtcatttgttgcaactaattttttgttttgtagataatccatccactgggtatctgctgaaataaaaatatcagctggtgctccagcttcaatttgtttagctaaggtcgatgaacctgcatatgaagttttaacttctactttattctgtttttcgtaaattttttctaaatcgttaattgcattcgttaagcttgctgctgcataaacagtaactgattcagccttggctggaacattaaagaccaatcctatgctgaggactgaacaggcgaaagccaaattttttatcttcgtatcacttaccattatgtttaccttttttgtgtttttttgcagcgatatatacccaagaatatagcgctacacgaagattatgaaaagcataattcgttaactatagatgactggaatgcagcagtgctttttcggcgtgcacttgatattaagcaaaagctataccaaatcaaaagatttcatcgttatgcaatcttttatcttaaccttttaaataactactcatgatttggtaatcatgctctaaagcttgtcgggcattgttttccatttgacggtaatgctgtaagactttctggcccaaagctgtgatagctgccccaccaccatgtgttccccccgtttgtgtttccactaaagctgtttcaaagcattgattcatggtgtcgactaactgccatgcacggcgatagctcatattcatagattttgcagcttgtgagattgaaccagttctcgcaattgcttcaagtaaatccgccttacccggaccaaatgcaatattttgctctaaaagaattctaatttgtaattttaagttttgttctttcatagacttagttcacaaagtttcatttttatgctgcttaacattataggaaactttaatagcttaaaacacatacaaatttaaatctctactctttcttcaaaagagttcaattaaaaaatcaaaactgcacaaagtggataaagatctggaaaaaacggatagagagcaatgcttaatcgcggttcaatcagttaaaagctgattgattggaggattgagtaaatgacctcatctaatttaaaacaatggaatgattttatagatggatgtatcgacttccgtcctaacgatggcgtgttccgtatcgcacgcgacatgtttaccgagccagaactatttgacttggaaatggaatttatttttgaaaaggtttggatttacgcatgtcacgaaagtgaaattccaaacaatcatgatttcctaaccgttcaaattggccgccaaccgattattgtaagccgtgatggtaaaggcgaactacatgccatggtgaatgcttgtgaacaccgcggtgcgaccttaacacgtgttgctaaaggcaatcaatctacatttacctgcccgtttcatgcttggtgttataaatcagatggccgtttggttaaagtcaaagcgcctagcgaatattgtgaagattttgataaatcaagccgtggtttaaaacaaggccgtattgccagctaccgtggatttgtatttgtaagtcttgatactcaagcaacagattcactagaagactttttgggcgatgcaaaactgttccttgatttaatggttaaccagtcgccaacaggtgaactcgaagtattacaaggtaagtcatcttatacctttgcaggtaactggaagctacaaaatgaaaatggtctagatggttatcatgtaagtaccgttcactataactatgtctctacagttcaacaccgtcagcaagtcaatgcatcaaaaggtgccgaactcgacacgctcgactacagtaaattaggtgcaggtgactcagaaactgatgatggctggtttagttttaaaaatggccatagtgttttattcagtgacatgccaaatccgacagttcgtccaggctacagcacagttatgccatatatggttgaaaaatatggcgaaaaatatgctgaatgggcaatgcatcgtttaagaaatttgaacttgtaccctagcctattttttatggatcaaattagctcacagcttcgtattgttcgccctgtggcatggaataaaactgaagtcattagccaatgtattggtgttaaaggtgaatctactgaagcacgccgtaatcgtattcgccagtttgaagatttctttaacgtatcaggccttggtacaccagacgatttagttgaattccgtgaacagcaaaaaggttttcaggcacgacttgaacgttggagcgatatttcacgtggttgtcagtcttgggaatatggcgcgaccaaaaactcacaagatttaggcattcaacccgttattactggccgtgaatttacccatgaaggactctatgtaaaccagcatggacactggcaacgtctcatgctcgatggcttaaataaaaaagcgctgaaaatgcaggatattacttttgaaaacaatgccgtaatggatgaggtgtaaccatgtcacaagaactacattttgctgtatctcagtttttgtacaaaaaggcagagctttgtgatgcttatgactgggatgcctacctagagctttacgatgaagatagtgaatatcatatcccacagtggattgatgaccataactatgttcaagatccaaatcagggcttgtcttatatttattatgcggaccgtactggactcgaagaccgtgtattccgtattcgtacaggtaaagcagcctctgcaacgccgttaccacgtactttgcacagcataaacaacatccgagttaaaacactggaagatggtcttatcgaagcaaaagttgcatggcaaacgctttataatcgtcaaggtttagaaggctgtttttacggacacgctacttatcttttgcgtcaaaccgcagatggtttccgcattcgtcgtcagcacagcattttgctgaatgacaaaattgattccgttttagacttctatcacgtttaaggggaatgaaaatgggacattcagttgcacttaactttgccgatggcaaaacctttttcatttcagtgaataacgatgaattgttgcttgatgcagcagttcgtcaaggaattaacctgccgttagactgccgcgaaggtgtttgtggtacctgtcagggacagtgtgaaaccggtatttatgaacaagaatatgttgatgaagatgcattaagtgagcgtgatttggccgagcgaaaaatgttagcttgccagacccgtgtaaaatctgatgcagctttttatttcgatcatgattctgctatctgtaacgctggtgataccttaaaaattgaaaccaaagtgactgcggttgagctggtttctgaaacgacagcaatcttacatcttgatgcaagcagtcacgctgaacaacttcagtttttgccgggtcagtatgctcgtttgcaaataccggatactgaagactggcgttcttattcttttgcaaatagaccaaatgcgaccaatcaattgcaatttctcattcgtctcttaccagacggtgtgatgagtaattacttacgtgaccgttgtcaggttggacaaagcctacttattgaagcaccgcttggtagtttctatttacgtgaagtagagcgaccgctggtttttgtggcaggtggaactggtttatcagctttcttgggaatgcttgataacttggttgaacagcctaactcacctgcagttcagttatattacggcgtaaatagtgaaaccgacttgtgtgaacaacagcgtttacaggcctatgcagaacagctaccaaactttagttatcacccgattgtgactaaggcaacggaaacttggcaaggtaaagccggttatatccatgagcacttaaataaagatcaactggccgaacaagcttttgatatgtatttatgtggcccaccgccaatgattgaagccgttaaaaattggttagatgagcaagctctgcaaaactaccgtatctacagcgagaaatttttacagagcaatacctcacgttaaaagtataaatagcttaaaaactactaaacctgaaatgattcaatatactcttataaggggtatattgaatttttgcatttaagttaaaagcttttatatatcaataatataaaataaaaaattccgacaaaataaattgaccagttcgcacggatttgctataagttttgatagatcttaaggaataagatcatgatgagattaagttatagcaccttattctatttctcgaatgtattaaattgatagtcaaaatccgacgtaaaaatttgagaaaatcacaataactagcagttagattggtctatatcttgcttatatctcattgtattttacgcttaacttaatttttaagtgccgtatttacttattgcacagtgaaagtttaaagcttttgcaacataggtaaatacaggagtgagccaaaagggataaatatgaaccaagccaactcccacgaactcaatggacgtcattttcaaaatgagtcgatctttactgatcataatttggtgttcgatcaccacgatttaagcgaaacctgccgcaatgtaggccaaatttttaaaccgcatgatcttaaaatctctcatcagaagcgagatttcagtgcaactatgcaccatgttaaaacaggcgcattgtctattagccgcttggaatatggcgcagatgttattattgaaccagatcatcttgataacttttacttaattcaaattccaactcaaggctatgcagaaatcgagtttggttcgcaaaagtttatttcttattctcaagttgcttctcttatttctcctcagcaatctttacgtatgcgctggcacgcgaactcaccccagcttattctaaaagtttcaaaggatgattttacttaccattgccgtcaacacattgctgattcagaaaataacttactcgtttttgaccctaaattagatttttctacccaaggtggagcctattttttacagctcgttagaacattgatggatgctttagcatgtgatcagcatccgctccatcatcctttagcctttaaacagtttgagtcaaatctatttaatgcactgatttatggtcagcccaacaatgcattacataagattgattattataaagaaaaaacggtatctccttatttcgtgaagcgtacagaagcctatattaaagaacatttacatgagccgcttaatgtcgaaattctggccgagcatgcaggcgtgagtgtgagaaccctatttactggttttaaaaattatttggggacaaccccaatgtcttatttaaaagaattacgttttgaacaagcccatttagagctcatgcacaatgaaaatctgtcggtcactgacgttgcatttaaatggggatttacccatttaggccgtttttcacaagagtacaaacgccgttatggtgagttaccttcgtctactcgccgatctggacagagtgaagggtcaggcatcattacttcaattttttcttaaattaaaaaatagataaaagccttttatatttgttgatataaaaggcttttttttatgacttaaaaatgatggacataacgaacttgtaatcgcgtaccttctggtcggttttcagtatcttgctcaaaataagcatttgcaaccaagtgatcatttttagaaaaactatacatcgcacccggaccaattgcccagacttgctcacgtcgacctttgactttttcaccatccacttcagtgtcagtgacttgttttaaccaatagccatttagtcctaaacggaactgttcggtaatagcatagtctgttgcaaaatttgcatggattgcttgccctgcctgcatatcatttgctccagcaaaggcatagcttgggtcatcatttttaaagttatagagataatggatacgcgttgaagctgtccattttggattaaaccaatatgtggcagcccaataagggtcaaatgaaacggcgttattacttgggttaatatctttttgttgattgtattcgccagtaggtaaattcacttgaaactcaaaacgatgtacaaacttcggtccttgtgcacctataactggatcaaactgaataaaaggtccgatcataatgtccccaaagccactttgggctttaatggcagcattattcaagccatcatccatgtccattttgctcacaaaaggaattaaaaaatttatgcctagactggctttatcttttactcggacattcgataaataactaatctgctcaaccagtacttgataatttaaatctgttttaggtaaaccgagtttttgtcccttggcatcgaccagtttattgctatcgtaattttgaaaataggtttgagcataccagccgggccctgcaggtaatccaccatcgagaaagctggtcatgcctaaatttacggtcggtaaatcataggcatgtgtaacccacggcaaacctaataatgtccctgctaaaaagccatgtttaattaaagtacttttcatcttcttatttcctataaaaaaatcacgaccggattgatcgtgattgtggtgaattaatgtgctaattctggatgctcagcggcaatccgatattttcctgcgtggaataccaatggttcaccttgacgctgttggtattgttcaatttgaccaataaaaatcaggtgatctccgccttcatactgatttacattgcgacaaaccaaggttgcgagtgcatccgtcaaaattggaacgcctgcattgcattgttgatgagcaatgcctgcaaatttgtcttcggcacctcgagcaaaatgccctgaaagctgatgatgctcttgtgccaacatgtgaatggcaaaatattcagcttctacaaaatcaggcaaacttggcgccgtttttgaaaggctccataaaattaatggcggatctaaagacagagatgaaaatgaattggctgtcatacctattttccggccatctttaccacgagttgtaatcacggtaacgccagttgcaaactgaccaagcaaattacgaatttctcttgggttttcagtattaatcgcttgtaaagctaaagtttcaattgtgtccatttttaaatcttcctttgatattttgaccttaagcgacttttgctgcggtttttgaagctaagaatgcctgagcttgatctgcatcaaaccaccacggagcaaaagagcgcgggtcatcaaagttattggccataattgaagcaatgctctggttttggcttgcagctgctaggagttcaacgacatgaggctctggtggtaataacaagctattggtccaagccacgactttttctgcataactccaatagcgttcaaaagtttgaaccatccattgttcactaaagctttgattatcattggctaaaatggcatcaaaatagatcttgctacacttagccgcattgtttgagccttgcccggtaattggatcattgaccactaaggcatctgccatgccaaaaatctttttgccagagggtaaggttaaaacgggcttacgtaccgtcggcgggaaacgccctgccaaataaccgccagcatcagttaattcaacatttgcgcagcgttcatattcccaaggcacaaatttcttgagtaagtccagactacattgcaggtgctgttctggtgttttcacatcttgccaacagtccattggcccatttggaataccttcaaataccataatgtcgcaaggcccattgatggttagtgccggaaatgaaaagtattccccgacttcaggaataatgttaaaagtcacacgtgaataaggtgaaattggcttcatgtttttgacgtaggtcaaagccaaagcgcgctgcggtttatcaaagacactgcgtgcatcatcacgctcaaactgtttaacgacttcacctttaccagcggcgagtaatacaagttcgtagtcgtttacgagttgttctaactcttctattcccacatcttgaatcaccaatcgaccaccacggcgttcaaactcttccatccaatatggcattttgacgcgttgatcgaccgattgagcgtagcgttcaagacgagcactccattcaaatgctttaccaccattttcaggattaactaaagctagcccaatgccttctaccgctggacattgttcttcccaaaaatttagtcccaagtcacgttcagtttgtaaagcggtatgaaacatacactggcttgacatgactttaccttgacggatttcatcagcagttcggttggtgatcatggtcacgtcatagcctgtatctaataagcccaaaccaagctgtaaaccagactgtcctgctccaacaattgcaatacggcgcataatcttctccataattttctaaatgtgcttttaaaacgctgtgctattcagctaaacgtggaatagcgggctgtaatccttcagggcccatcactgaatatccgccatcgaccgcataatctgctccggtgacaaagctcgcagcaggtgacaataaaaacaaaacaacattggcgacttcttcgggatgacccaatcggcctagcaagtggtaatcggctgccacgctatcggccttttcacggttattgccactgacttctgcaatgactcgtgaccatgtccaaccgggagaaactgaattgacgcgaataccatcggtagcaaaatccattgccatgctttgtgtgagttgacgtatcgcggctttagaaaccggatataaccagcgccctgtttgtgctactttggccgagattgaagtgaagttaacgattgaaccttgctgcttttttaggtcatggtataaagcacgactcagctcaacggtagagaccaaattaatatcgagtgcttgtaaccagtcctgacgtgaagatttaaaaccatcatctaagtaggtacatgccagattgaccaagcaactcacttcacctaaatgttggtgaatatccgccacagcttgttgaatagctgcatcactggttaaatcggtttgaataaacatcacatcatggttaaagctttctgcaatcgccttaccttttgcatcaatatctaaaatagcgacatgagcacctgcactgactaaggcttgcacaacggctttgccaatgagtgttgcaccgccgcttaccacagcgacttttcctcttaaatttatattcattgcaaatactccttaactgactggcttgccttcactacttgaccaagatggcatcaacgtattggaaggaagatcttcatcaagaagttttcgcgctgtctcaatacctgcaactggtaagcctgttgggtctaataaaccaatttgaacaagtacagacgcttggtcccagtaaatatgctcatggcacagctttgaacctctgaactgaattacacctaacattggaatttcgacgtatttaccagttggttttacacctggtaataaccagtcaatttcagcgtcgtgtgtaaagctcataatgaactcgtctaccacttgcgttgagccaacggtacgagagatcgaggtgatcttcatatctttcgggttttgatgaacaaagtgatattgataaaaacgagcaagctggctttggcctaccccaccagttaacgttggaatatggttgacataaggttctgcgaccattgttgccatagttgcggggacgtcacgcgtatcgaactcatgacgaatatgctcttcccagagtgtaactaagtcatatttcggcccaatcgtttcatgtagtgctgttactgtacgctcgtgagcaaagcgtgctgaaggtttgtggtaatggttgctttttggtcgtgcaaaggcatgatcaacaccttcgtaaacataagcttgtacatttgaatattggttaactgcatcgacaatcgcttgtctcgcatctggcggtgtaaattggtccagttctgcaatatgtaaaaccaaacgtccttttacgttagctaactcatctaaagttttttcaatgcctacaccgtaataacctacggcacatgccacttccgaaagtcgacagcctgccaaataagctagctttccacctaaacaatagccaaccacgccgagacctgtagaggtatcacattctggtcgtatctttaaaaaagctaagctgtcttgaatatcttcaacaccgaggttttcgtcatattgctgataaagttcaaaagctttttgaaaatcatctggtgtataaccgagttcaatattaggtgctacacgccaaaatagatcaggtactaaaacggtatagccttcttctgcaagaaaatctgccttttcccgcattgctgcattcaccccaaagatttcctgacaaagcaccacaccaggtccttttcctgtttctggtgtcgctagatatgcactgaactgctttccagatgcagttttaatttgaatggtttgaccagccatagtgtcaactcctgacattgttatggctttatcttctatctgaaattttttttagactgtccaaaagctgcaagcattatccaatctctgcgcaattatcaaaatcaatcaaactggataaaaattaaaaacaaagaaacatctatatttcaaaaacttaaattaaaaaattaaattactgctttttatctaatttggaaaatatggatgaagattaggacttattggatagtgaagactggctaaaaatagttcaatcaaagatacaggttttgtaacgaatacattgaattactcagggaattaaataattttaagaaggaatacatatgaaaacgatagatgcgaatacgattatcaatcgcgaaaaactgtctcccttacagtgggtggtttttattctaggcttttttgtctttttctgtgatggtctagacacaggaattattggttttgttgctccggcattactagatgactggggaattaccaagcctcaacttgcaccagttttaagtgcagccttagttggtatgtcaattggtgcaatcatttcgggacccttagccgataaatttggccgtaaaggtgttattgtttttacaagccttttgttttctatatttaccattttgtgtggctttgccaattcaactcaagacttaatgatttatcgctttattacaggtgtaggtctaggcgcggccatgccaaacatcagtactattgtctcagaatatatgcctgtaaaacgtaaagcatttcttacaggtcttgctggctgtggatttatgctgggtatttcttgtggtggtgtgctgtcagcttatctattagaaagctatggctgggctaaggttattattattggcgggagtattcccctaattttagtggttgctttattacttaaattacctgaatcaactcaatacttaattacacgtcatcaacaaggcaaagcacagcgtattttagaaaatattcaaggccattcttttcaagagccggtaaaacttgttttaactcaatcagaaactgcatcagatgaaaatccagttaaagtagttctaggaaaatatctgtggggttcaagcatgctttggctctgctgctttaccagtctgttggtgttttatcttttaacaagctggatgccaacgattttaaaaacagcaggttttagtactcaacagtttagtttaattgctgcgattttcccttttggtggtgtaattggtgcaactattatgggatggtacatggataaactgaacccaactacagtgattaaatattcatatctcattgcttttggactattcattattgctggtctggtgagctcaaatattttcttgttaggtcttactatcttcttaattggtgctttactcgctggtgcacagtcttcattactgccacttgcagctatgttctatccagcagtatgccgcgcggttggagtttcatggatgcatggtatcggtcgtatcggtgcaattttaggcgctttctttggttcgctcattttcactttcaacctaagcttaagcggtattttctttattctagcaataccaaccttcatctcatttattgcacttagcctgaaagtaatttatgagaaatctaaaaacaaacaagtgttaaagctagaagaaagtctataaatattaatcgataaataaaaaactgatttagttgcctaaatcagtttttttatttggaaaattaaatatcagaaaattttgcctttggtctcacttggattttctccaaattcttcacgatattcttgagaaaaacggcttaaatggttaaagccccagtcatacgcaagctttgaaatagaaacctttttatctgctcctgtagtgctcaagattttgtaaatttgttgaagacgatattttttcaaatacgacattgggctggtgccgtagtattgttgaaattcatcatacaattttgattttgaaaccccagccaaacgctgcaagtcttctgcacagatttcttcgtgagcatgttcaataataaaattacgaacctttcgaatataagctggctcatcttgatgtgagagtgactttaaagcttcagagtagttgttttcttgagataatagtaaggctttaattacaaaattttcatagtcttcagataacatctgtaaaccataaaaattgctatattgcgattttagctgtaaaaaattctgaatattcttccaccacgctccaatcagttgctcagagtctaagtgcatttcagggttaaaaatgataggcgtttctataggtttattcagtaaatctgcaaggacaatctgcatacttcgctcaggaataaccacctgaaattttctacagtctttatcgataatcagatcttgttgatcattatttgaaacaattaggcctctgttttcatcagattgataatgtgcaccacgaatgttgagagcttgtcgcccctgtataggtaaactaatgctataagcttttaaatttgagatgttgatagcgacgtttgcaccataactgattgtgccgattgccatttttttattaggcaaacgcattccgtcatagtggaaatcgagattatctttgtaaattgtgtctagacggtgttcaccacaaattgtggacatcagattctgcgcaaattcagctttgcgggaataatgattgagttccatctgttggctgagtgatatcatatccttttcacctagctaaaacttattgctaaaaaagcaacttgtatgccaattaatatcctttaattgacgagttttcctgaaaatatctaatcaggacatgcgtaaatattactttctcatactctattaaattttaaaaatggaaataagttaaatacctttaaagtataaatttataccttaacaaacttattttattagtttttttataacaacttatagtagagataaagcattattttgaatagtaagcgatcgtaaatttttaacgaataaaaaaccgcttatatagaataagcggcttttataaaacaattctctgtacacgataaaaatagataactcattgaaataatgtcataataattgttttctaacgacgaatactatgacacatctcaatgagttatatcttatcttaaacaaatatctaaaatggaacaagtcacatttaaagtgctttgcgctcatcatgcttgtgattattttaaagcaaacatgtaatctttcttctgcatctaaagccttgcccatcaagtgcttaccacaatcattttatcgacgtatgcagcgcttctttgcaggtcagtattttgattatcgtcaaatttctcagttgattttcaatatgttttcattcgaccaagtgcaactgactttagatagaaccaattggaaatggggaaaacgaaatattaatatcctgatgctcgcaatcgtttatcgtggaatagcgatacctatcctttggacattgcttaataaacgtggaaattcagatacgaaagagcgtattgctttgattcaacgctttatagccatttttggtaaagaccgtattgtgaatgtgttcgcagacagagagtttatcggtgagcagtggtttacatggttaattgaacaagacatcaacttctgcattcgtgttaaaaaaacttcattgtcaccaatcatttaggaaagaatcataaaattagtgatttatttcgccatcttaaagttggtcaaattgaatgtcgtaaacgacggattttggttggtcgggtgaaactatatataagtgcactacagttagaaaatggagagcttttactcgtcgtttctcctcagtttaatgccaatgctattcaggattatgcattacgctgggaaattgaaaccttattcagttgtctcaaaggacgcgggtttaatcttgaaaatacgcgcttgacagaccctagacgagtgaaaaaattgattgcggtgttagctataagcttctgttggtgttacttaacgggtgaatggcaacatgatcaaaaaaaagcgataaaaataaagaagcatggacgactctcaatgagtttatttcgctatggtttagactatgttcaaatggcgattcagcgtttaattggttttgggaaaaaagaagagtttaaggaaattttggcaattttaagaaggcagaaccctgataggataagggttctgtgaaatttgtcgtgtacagagaaaacaattaaattattgggccgtataaccgccatccatcacgacagcttggcctgttaccccacctgctttttcactcgcaaggaaaattgcataatcagcgatttcttcaacagatagcaaacgcttttgaggaaccattgccaaaattacatcctcaagtgcactgtctaaacttacattacgggttttagccaaatctgcaatttgcccacgaaccaatggtgtatctacataccccggacataaagcatttaccgtaataccatcacgtgcacattctaatgcggcaacttttgttagaccgatcacaccatgtttagcgctgttataacctgcctttccagcgaaaccaatcaagccattaattgaagccatattaataatacgaccatatttctgagctttcatgattggaaaaacatgtttaataccaataaatgccccagttaacatgacttgaactaacttttgaaaaacagccgttggaaattcttcaatagatgcaacatgttggaaaccagcattattaattaagatatcaaccgtaccaaaggtcttttgagtaagctcaatggcttgtttataattatcttcatcagtcacatcacatggtgcagataatgcatcaaaacctcgctctttaagtgagtttgctgtttcttgacacttttcagcattcatatcagaaataacaactttggcaccttcttgagcaaatttcttagcaatctctagaccgataccacttgcagaacctgtaataaaagcgaccttaccgtctaaaagttttgtcatttatttactccttaatacttataacgtgctgatttaaacaatacctgttacggtaaagaccgtaatcactacaaataccgctaatgttttaattactgtgactgcaaaaatatctttatacgattgtttatgagttaaacctgtaacagcgagtaaagtgataacagcaccattgtgcggtaaggtatccataccgcctgatgccattgcaaccacacggtgcatgacttctggtggaatacccgcagctaaaatcgcggcgttatattgttcagccatcgcacttaaagcgatactcataccaccagaagctgaaccagtaatacctgctagaacagttgtcgtcacagccccatttactagtggatttgtaaaagtactgctcattgcatgactaatcatggcaaaacccggtaatgacgcaataattgcaccgaaaccatactcagatgcggtattcatcactgctaaaagtgagccaccaatactggcattaatgccttctttgaagttcgtcactacacgctgataatcaaacaaaattgcagtaataatcccgacaatcagcgcaagaccaactgcccagatcgcaccggtttttgcaacatctacggtgtaatccgctaatccaactgcggcaaaatcaaaaccatttggataccactctttgattgctttagacaaatatttgttcattacggcaacaagaatgagaggcacaaacgctaaaaactgacgagccgtacttccattattttgcaagttcatatcggcttcaatttcttgagatggtgtattgtctacgccaaaacccgagaaaccttcgccagcttttgcagcagctcggcgacgccattctaagtaagccaaacccatgcatagaacaaaaatagcaccaataattcctagaaatggtgcggcataaatattggtgccaaagaatgtagttggaattacattttgaatttgcggtgtaccaggcaaagcatccatagtaaatgtaaatgcacccagcgcaatggttcctggaattaaacgttttggaatattcgcttgtctaaaaagctggtttgcaaagggataaattgcaaatacagcaacaaataaacttacaccgctataggttaaaattgcacctagtaatacaaccgttaaaattgctttttttgccccaatccatcttacaatggttcgagcaatagactcagcaattcctgacatttcaacgactttaccgaaaattgcgccaagcaaaaacacaagaaagtaatctttaataaagttcaccattttgggcataaaaacacccgaataaaacggcaaaacattggctgggttaatgagtaaaactgcaagtaaggcacaaattggtgccatgagaatgacagaaaagcccttgtaagctgtatacatcaacagcccaagcgaaagtagaattacaaataattcccacatatattctttctccctaaagaatagatattaggttcaataaaattaccaaaagatatttaggttatcccaaacctataatgataaaaatcacaatatctatgtgtggtaataggtaaatgagcttaaaaataaaatatcactaaaatatttaaaaacaatgtaatttatttaaatttttaaataccaataaaatacaaacacttatttggctctcttagtaaaatttaattattaaaaaaatattattgttttataaaacttattaattattgagtaaattaaattaatgtttctatattatttaataaagccaattgaataatatattttttaaattaatttaataaatattttattagttgagatcagtaattttttatctctctaaagattttctactatgtacttttaatatttaatttctactataataatataaacaatataaattaatatatagattagcgctgccagtaccccaccgattactagtgcgatctccattgaattagagggattattttctggttttctagcaaaaattaccgggtattttgcattcttaattttttcttcagcaattcgataatgctttttacctattcttataaaaataaggatacaaataataggtaaaataaatgatgagtaataaactaatgaatctactgacaatttattattgatcgcatcatcacatttatgaaaataattttgattttctttacttaatttactgattttttcaggagtaatttgactaaaatcaaaatcattacggcaaccagatataaagacatctttggcatctctagaactacttgacccactactcgtatgacgcatatgtactgttgtataagacataatattattacaaaataaaaagctaaattttattagattaataataattggcaacctaaaccttccttagctgatatttccaaatagtagcggctggatcctgcgtttcatcatactttgctaaaaacactgattaattcagctagaaaaatttactaaaataattcagcacattgagctctacttgctttttcataattttttgtcaaaaaacatcatattaggcaaattttcgtataaattactcttctaggtaagttgagtaatttaaaggaaagaaatgacgcttaaacaactaaaagcttttttggcccttgcgcgtacactcaactatgccaatgcttctttagagttacatctcagccaatctgctttaagtctcaccatcaaaagcttagaggaagagttaggcggtaaactgtttaaccgtaatacacgccgagttgagcttactcaagaaggtaaatcactcattccatatgcaaaaaaattactcgccaattgggatgaaatggaaaacgatgttaaacaacgctttaaactcaatcgtggaacattaagtattgcctcaatgccctttgtgacccatgcaattttgccagaggtgattcatcaatttttagcagtccatcccaatcttaatttttcaattcacgatattccaaatgagaccattatagaaaaagtacaagatggtatttttgagcttggtatttgttttgaacctgatctcaccgaaggtttagagtttaaaccgttgtttgaagaagacttcttagctctattacctaagagtcacccactcgctcaatcatcttctattacatggcatgagctttgttcaaatccatttgtaaccttgcaaaaaccctcaattgttcgatatttagttgagcaaaattgtttgcgaaataatataacgctcgatttaaaagttgaatgccaccaaatttcatctctttcaagtttcgttgcttatggaattggggtaagtgcaattccaaggcattttgctaaacacattgataaagaacataacgtactgattgatttaaaagacgaagccattcataaaacagtaggaattgtttataaaaagaactttgaaatttcaaatatttctgctcaatttattgaggcactggttcaatataaattttaaaaaattaaagattgtcttttagtataagttaagcttatggataagttaaattctttaattcttataatttttaatatgttgtatattgatttttaaattttttagcttatatgcgtcttaagttttgtacttaatttgatattattcattgattatacttattaatcatttaaaaaaattaacttctataacacaaaatgtgatgctaaaactagaaacactaagggatataggaaaacaacagaatgaataaagtttatgccaacgcagaggcagcactgaaagatgtaattacagacaatcaaacacttgctgttggtggttttggtttgtgtggaattccggaaaaactaattgttgcagttaagcaaagcggtgtaactggtctcacatgcatttcgaataatgcaggtgtagatgattttggtttaggtatattgcttcaaaccaaacagatcaaaaaaatgatctcttcttatgtgggtgaaaataaagaattcgagcgccaatatttaaatggtgaattagaagttgaactaaccccacaaggcaccttagctgaaaagttacgtgctggaggtgctggaattccagcattttacacacaaactggtgtaggtacactcattgctgaaggtaaagaagaacgtatttttaacggcaaaaattacattttagaagaatctttaacagccgatgtagctcttgttaaagcatataaggcagacaaggcaggtaatttagtatttcgtaaaactgctcagaattttaatcccgaatgcgcaatggctggaaaaattacaattgcagaagttgaacaggtggttgaaattggtgaattggatccggatgaaatccatttaccaggtatatatgtgaaccgcattgtattaaatgcatcacctgaaaaacgcattgagcataaaactttaagcacggaggcagtataaaatggcttggtcacgtaatgaaatggcacaacgtgctgcaaaagaactcgaagatggtttttatgtcaatttaggtattggcttacctacccttgttgccaattatattcctgaaaatattaatgtttggcttcaatctgaaaatggcttattaggtattggtgaattcccgactgaagaaactgtggatgccgatttaattaatgctgggaaacaaacggttactgctcgctctggtgcagcctttttctcaagctcagaatcttttgccatgattcgtggtggccatgtcaacattgcaattttaggtgcaatggaagtttctgaaaaaggagacttagcgaactggatgattccgggtaaaaaagtcaaaggtatgggcggtgcaatggacttggttgttggtgttcaaaaagttgttgttcttatggaacactgcgcaaaagacggtacaccaaaaatcgtgaaaaactgtagtttgcctttaacaggtaaaggtgttgttcatcgcgtaattacagacttaggcgtaatggatattacgccacaaggtgtagagctcattgaacttgctaaagacgtaacgctcgaacaaattcaagctgctacaggtgtcgagttttataaaaccttagtcgcgtaaattctaaggcttagttagctgtacaagactcaagttagtaagtgagcttgagtcttagccctatcaagcaccggatgtgctgtctataaataagaatgagaaggattttttcagctatggaaaaacagcaaggaatttttgaaagatttgctcttcggattagtgactggtctgaaaaatggtttcctgattcatatatttttgctctgcttggcgtcattattgtctctgttgccgccttgggtattggtgctccaatccatgatgtagcgacctcatttggtaatggcttctggagtcttattccctttaccctgcaaatgactatgctcattattgtaggttatgtcgtttctgtatctaagcccgtaaaattcctgatccaaaaaatggcgcgtattccaagttctggacgtggtgctattgttttggtggcaaccgttagtttattaatttcactagtcaattgggcaataagtacgattcttactgcacttttagtgattgcattagcaaaacgtaaagagctgaatatggattatcgtgctgctgcggcagctgcaatcattggtatgggagcaacttgggctcttggaattagttcatcagcagcacagcttcaggcaaataaaaccagtttacctgagtcaatttataacctaactggtgttattccatttaccgaaacgattttcctttggcaatcaattgcaatgaccattattttagtgattgtttcaatcgctattgcatattggtctgccccaaaaggcaatagcgttaaaaccattgatagttttgatgtgcaatttgaagaagaaaaaacaaatgaagcaaaatctactcgtccaggtgactggttagaaaattcgcctatcttaacgattattgtggtgattttaggcttaatctggatgttttttgaattttcaaaaagcaatcccatcattgccatttcaagtctcaacacctacaacttcgtgtttttaatgcttgggttagctttacatggcacaccacggaactttttaaatgctgttgcaaaagcagttccggcagtatcgggcatcttaattcaatttccactgtacggaagtatcgcctttattatgacccaagctttaaatagccaagacttatcgctgtcacattatattgccgaatttttcgtttcaatcgcttcaaaagaaacctttgcaattgtgatgggaatttactctgctgtacttggattttttgtaccttcaggtggtggaaaatggattattgaagccccatatgttatgcaagcagcaaatgatttaaaggttcatttaggctggtctgtacaaatttataatgcagccgaagctttaccaaacttaatcaatccattctttatgcttccaatgttaggcattttaaaactaaaagcaaaagatgtgattggttttacagtgacacagctcgttgtgcattttcctttagttttattcttgctgtggttctttggtagaacgctcagctatacccctccaactttttaatttagtggcgcctttagtttaggctaaaggcaaatttagcaaatacaccaataagagatattaagatgagttcaattgttatagtttcaggtagccgtactgcaatgggtggttttcagggtagtttatcttctctaactgctccagaacttggcgctgctgtcatccgtgaatcgatccaacgtgcaggtgttaaacctgaacaggtagatgaagtgattttcggttgcgtactcagtgcaggtattggtcaaggccctgctcgtcaagccatgcgtaaagctggcgtgcctgatcatgtcggagctgtgaccattaataaactttgcggctctgcaatgaaagctgtgttaatggcatcagataccttaaaagcaggcagtgccaatattattgtggctggcggcatggaatctatgacgaatgcaccttatattttgcctaaagctcgcggtggttatcgtatgggacacggcgaaattaaggatcatatgtttttagatggtctcgaagatgcagaaacaggtcgtttaatggggtcttttgctcaagacatggcaaataccaaaggctttacccgtgagcaaatggatgactttgcaatttcttcacttaaaaaagcgcaaactgcgattacggaaggttacttcaaagaagagattgttcctgttgaagtaaaaacccgtaaaggtgtcgaagttgttgatcaagatgagcaaccattaaaagctaatcttgagaagatcccaacattgcgtccagcttttagtaaagatgggacaattacagccgctaactcaagctcaatttctgatggtgctgctgcgttagtacttaccactgaagaatatgctcaaagtcacgggttaaatactttagcaaaaattgtggcaacttcgactcactctcagcatccaagcgaatttactattgctccaattagtgcaattcagaaagtacttgagcgtgctggttggtctgttgatgaagtagatgcttgggaaattaatgaggcttttgcgatggtggcaatggcaccaattcatgagctaggaattgatgaagcaaaagtaaacgtccatggtggtgcatgtgcattaggccatccaattggtgctacaggttcaagaattatcctttctcttatttatgcattaaaacgcttaggtaaaaagaaaggtgttgctgccctttgtattggtggtggtgaagcaacagccgttgcgattgaaatttaatttaaaattaaaagaagatgtaaggattttcttacatcttctttttataattaaaacttttaagcagttttaaatagttcataacaggtttgacggaaccatttatggctactcttgtggtgacaagacatatgccaatgttgcttaacatcataagttggaaaatcaagcggtgccggtaaaatctgtaagttctctctaaccaataaaacctgacttaaataatatggcacagtggcaatagcatctgtttcctgaacgactaatcccacccctaaataacttggtaagcgaattaaaatatttcgatccagccctttattttgcagctcatttttaatgtgataatgcccaatacccgcatcaatatcgatgtgagattcacgcatataatcctctaaagtgaaattatttgggtctaaacgtggatggctttttgagctaattacgacatagtgttgccgaaaaaacttctgctgataaaaaccttcttctaattgcggtaaaaaacctatggctagatcaatttcgccgtttgccatttgatagctagtttctggagtaataggcctaatatttaaacgaatcaaaggtgctttttcttttaaataattggttaattgcggcaacaaaaccaaatgagacacatcagtcatcgcaatcgtaaacaactgatctgaggtcaaggggtcaaagttcacattaaaattattaatactttcaaccttatcaataacttcactaatgagtggaaaaatttgctttgccagttcagtcggaatcatttcattaccgactcgaataaacaaaggatcattaaaatgttggcggattttgtttagaccattactaacgctcggctgtgtcaaaccaatggcatctgcagccattgaaacacttttgaaccgataaatatgataaaaaatatttaataatctactgtctagatcaaacaaaattgtctccgcttggactcaataatccattgaaataagctcaaagtagatatgaaagagataaatactcctatactctacttttgacttattgaaatttactctaaattatcaaagaatttagacaaggggcaatgctttatactgcctttcatcgtaaagaccaaagcataatctacttatttgcttaatttatatataaatatcgtgtacttcatcatttcaaatgagtagacgttataggtcttgctggcctttaaaaccattccatattttctgtaccgacttattatcactcaaattatttttgaagatataaatatcttgagcaaggcaatattcttgttggtctaaaatgactaattttccggctgcaagatcttcttcaacattaatttttggaatccaagccacccctagaccttgtaaaaccagctcttttaaattggtggcattatctgtttcatataacgttttatatacaagcttaccttcaatcagttgatctaccaattttcttaagtacgcgtgtttactatacgctagcagagcaaagttactttgtattgtatgtttcgggctatggtcgggttcagttgcagaaaccggtacaataaccgtttcagcaattttgataccacttaaaatatcatccccaacctttctaatattgcttttatctgcatagcaaatcataaagtcacaagcaccttcttttaacaaagacaggccttctccactattcgttgcgacaatttcaatttttaaatcacgaataagtgtaggaaatttctttaaaaaagtagttaaaaatccagaagctaaagaatgaacaacgcagaaacgaatggtcgattcagtttcatttttaatatttttaatgagttttgcggtctcctctacctgtttttcaatatttttagacatcactaataaaattcgaccaatgtctgtaaattcgatgttgtttttgttgttcctaataatgacttcagcaccaatcatttcttcaatttgttgaattcttcgagtaaatgcagactggctaataaatcttttctctgctgcttttgagattgaacgttcacgttctaatgtgaggagatcctctacccaacggacttctaaattcatcttatctattcccttttagatttgtaattttattaattgatatttttgggaagtagcataaataaatttagtgatgagaaagaatgataaaacatagggagtacctgcaaaaatgcgagaagtgaaaggacaaagccaatctataaaattaagtatttaataattctgacatagaaaagaagataagaaaataataggttttgttttcacgagacaagagatgaacataagtacaattcagctaaaaaaattatttaaatcaaacaataaaaacccatcataaaaataaataagtgaacttaacaagataacttttagaaataggcacgaacttatatttgtacattttattgataaaaaaagtccgcaccttggggaagaatgcggactgtaaactgtttcaataactgatccttatgttattgattaaatttttcagaatcttaattaagatacttttccactataaaaggtagttaaaaaatctattttcataccctttttactttgcctaacccaaaaaacatgaaaaatgattttttactctctcaatgggttggtaaggtaataattgataagaaaatgattaccttacctcatttcaggatttaagcagtcataataattgattgtatttaaatacaatatttgaaaagagtataagataaaaagataatcccgactattatactaaagtatctatttaggtgtacgcaaacgtattgagtcccctttaaaagcggtgacgattttcgcagacgggttgatcaaaatgacctaatattcaccaatcaagtagtataactttcttgaaatttcaaccatcatattagaagtatattgactgatttcaaatatctgttttttctgtggattgaaaaccatattgtctttttcatcactaaaaaaaacataagttgtgtatttatccatgtgatgaatatgctcttttaagctgagtttctcaccagagttagggtcatatgcaataaacttcattctcatgcatttgtctctttacagcgtgcttacaccttataaaatttcagtcaaaagattatttaacagacaataatcttgaatgcctaaattattgatacgatgcagtagggatattttgtttagctttttgaatagataactcagcattcttaattgattgctcagcttctttaagcatgtgcgaacttttagtttcagctttttcttcattatcccaaaggagataacaagcaaaacttcccaatattaataaagcagcagttacttttaacataaacttaataaatcaaaattttctgtattataagtatttttatgtgaaatgcatcacaattttattaaaatttattaaacaaaactcattatttacttatataaattaactttcacatgaaaaatcaaatatttttttgattttaatacacggaaatgattgcttagttttctgtataaattttgatttacttacattttcacacctttgaccaatctataaaattaaataaatatttgaatatattaaactttagaacaagtattcattctgtatacgctcatataccaacgattatttctcgactaccctcttttttgttatgcaaaaaatgcataattgctttaataaatgcattagaagtgaagcatttcgaattctaagatgaatcatctttactgattcgaagtttaatgatgaacgctgatattactacccgtattgagaaggatcttattggtcatcgagaaatcaacaatgaccattattacggagttcaaacattacgtgctttagaaaatttcaacttaacaaatagcaaagttggaaatttccctaatttaattaaagcattagctatggttaaactagcttgtgctgaagcaaactataatcttaaaaacttagatcaaactaaatttgaagcgattgaatacagctgtaatcagcttattcgtggtaatttccatgaccagtttccaatcgacatgatgcaaggcggggctggcacttcaaccaatatgaatgcaaatgaagtattggcaaacgttgctttagaatatatgggccattctaaaggtcaatatcaatacttgcatccaaataacgacattaatatgtcgcagtcaacaaatgacgtataccctactgcaattcgtttaggtttattacttagcctagatgagttaaatcttccatttaacaatttgattcttagcttcttgaataaatctcaagagtttgcacacattttaaaaatgggtcgtactcagttacaagacgctgtgcctatgacattaggtcaagagtttggtgcttttgcggtaactctacaaaaagaccttgagcaaattaatacgcttattccaaatgttttagcttatatgaatcttggcggtacagcgattggtacaggaattaccactgaatatagttaccgtgaactcgcgattcaagcacttggaaaaatctctggtaagaaaattaagtctgctcctgatctaatcgaagccacttctgatatgggtgactttgttcttttatctggtttattaaaacgtactgcaactaaactttcaaaaattgccaatgacttgcgtttactttcaagtggtccacgtactggtattaatgaaattaatttagaagcacgccaacctggtagttcgattatgccgggtaaagtaaacccagttattcctgaagcaatgaaccttgcttgcttccagatcattgcaaatgatttggctgtaactttagctgctgaagctggtcaattacagttaaatgcaatggaaccacttattgcattcaaactgtttgaatcgatggacttgcttggtaaagcaatggcaatgttccaaactaagtgtattgatacgattacggcgaaccctgaacactgtaaagctttggttgaaaattcaattggtattgtgactgcacttaacccatacctaggttatgaaactacaactcgtattgctaaaactgcaaacgaaactgggcaaagcgtattggctttagttcaaaatgaaggtttattatcagcacaagtgcttgatgatatcttatcgattaataatatggttaaaccaaaaatgtcggcttaattcctgaaataaaaaaaggagcttataaagctcctttttttatttcttctacaacttttaaaagctaaaatttgtagaaaattgagctgtgcgaggattacctaagaacagatagtcatctcccataaatgcccctacatcacgccaatatttcttattaaataagttatcaatattgaatctaaaagtagtgtcatgcccagcaaaatttgttttataggcagcaccaatattaaagacactatatccgcctacttttgcagttccctctttatttgcatatttactgctactgtattgcataccactgagtaatcttaatccttcaactgacggtactttataagataactgggctgtagcacgtactttcggtacattttgagtttgatgacctttgtaactgtcagtatcaatatcaactagacgagatttggtataggtaatgccagaacttacgtcaagtgtatcggttaaggcacctgttaaacctaactcaataccttgattgtgttgttcgccttgtgaaataaattctaattctcctgcagaatttgcagtcgtatattgattatcttgctttaaatcaaaaatagctgctgttactaagaagttccgaatttgttgcttaataccaacttcatattgttcagagtttttaggagatagaacttctagagcattattagcgaaccacggagcttcaccaccatctgataatcctttggcatatgaagcataaagattagtcgtggaagttgggctatacatgagtgctaattgtggcaagaatttgtttaaatccgtatcacggctttgctgcccatctgaattataagcttgctcatcaaggtgaatcagttttccaccgagtagagttgaccattgatcattaaattgaactcggtcagatacagtaagtgcagtctgatcactctctagagctttgtaacgatcgccagggctttccgatgaaggactgtagtcgaccgtatcttcatagatattgcctgttcctaccgctacattcagtggtgtatggtgttttaaggttttatatgtacgttgtaattcgaaagcgatttgatgctgaatgttgccagtattgaaatgaccatttaacccagcagcgaactggttagtaattcgtgtatcatctgggctgcggaagtcataaatgtcataatttccgtgtttatcaaaagtattgcccaaaccagaatattcacaaatatcgttataacatccccatgggaaagcactattatcatcaatcacaacacggctttgtgatgcacttaagctaccattccattgatcgttaaatgcatattgatatttcaaacttgcatttacactgttatttacaacaggtttactccaagactgataacccaataaacggtcttgatctacatttgttggtacttcttgcccatcaagcagttgataaccgggtactgaacgttgactttgatgctgagcttcaatatcaaacaataatttagaacgctcattaattttccagtctaaagcaactgaaccaaactcacgcttaccatttgcgtgatcaacatttggatggatgctttcatgggctaaattgattcgataaccaaaactatcattaacaaagccgcctacatccgttgccagtgtatagccgccttctgaatttgcatcgaccgtaatagttttaatatcggcaggtcttttggttacatagttaaccacaccacctggtgtcgacattccactttgaattgcagaaatgccttttaagatttcaacttgttctttattttctaaagctacattttgttcgccacgtatggtatggccattaatgagatagcttgagcctaaatcaagcgcaaaaccacgtgctacaaaatttggatagtagccaattgcagcataaccatcgcctaaggatgaatcatttttaatcacatcggtcagtgtttttgcgtgttgatctgctatacgttcagatgtaatggtggtaatagatgcaggtactttctttacatcaccagtttgaaaaccagataaactcactttttttgatgtgtatagtgcatcactattttgtgtagcgttcacagtaatggttgggagctgcgaaacctccgcttcatttgcatagacgacagatgttatgagtgcaatagatgaagccaatgctgttttagagcatgtcatgaagtgaagatttaacgaacgtctttccattgaataactacctgccataccgtgcataatttgaagcgctagaaataagtgctgagccgttttttagccacgcaagaatacagctacatatattgagaaacaacatattctgtattttttcgattaagtgaatttagttcgactttttcaacttatcattctatgaatttcctttattttcttgggaattgatactataactttttaagtattatcaaatattcaaaatacacttaagctcaaaatggcacttaaaaggagaaacagaatagaaaaatactggtattaaactagcttactgattttaaaaacaattaattatgcagttaaataaaaggaagtgttcgatcattggtaaaaaattctttaaatcgaacaaaaggacgtaatctcactagaatcgaattttaaaattagaaaaaatgaatggttaggaattctaaggacgtgctcagggtcgagtgatttttataaagttcattctattttctgtttagcccacctaaaaagttcctagtttttgtctacaaagtgatggaagtaatatgacatatactcaggaagaaaaacgtagcaggatacgtgggattgtaggcgcagcctctggtaatttagtcgaatggtttgatttttatatttatgcagtatttgctgcttactttactcaagctttaaccgcgccagatatggatagcacaaccaagtctatttatgtttggggggtgtttgccgcaagcttctttatgcgtccgattggaagctggctatttggtcgtattgcagatcgacatggccgaaagaagtcgatgatcatatcaatctgtttgatggctttaagctcctttttatttgcagctttgcctacttatgatcaagtcggtttatttgccccttttctgttactccttgttcgtttacttcaaggcttatcagtgggtggtgaatatggcgccgttgccacttatatgagtgaattaggcttaaaaggtcagcgtggtttttactcatctttccaatatgtcaccctctctggtggtcaattgcttgcaagcttactgggcgttattttgttgacgttcttaagtgaacaacaattacatgatggcggttggcgtattccatttgttattggtggtatcgcagcaatcttatctttgcttgcacgtagtcgtttagaagaaacactttctcatcaagacagcgaacgaaaagagtctggtagcttaagagaactctttaaaaagcactggaaaacctttttattagtggttggatacacttctgctggttcattaacgttttatgtagagaccgtttattcaaaaacctatttaaccaacttagggatggacggaaaaacagttggttatatcatgaccttcgccctatttgtctatatgtgtgctcaacctgtatttggtgcaatttcggaccgtattgggcgacgttcttcaatgttggcatttagcttattgtccgccatttttatttatcccgtcatggtgatcgggatgcgtgcctatatagattctccgatcatcattacattgctactcatctttatgatgatgttactcagcttctatacttctattagtggtttggtaaaagctgaaatgttcccacctcatgtgcgagctttaggtgtaggtttctcttatgcagtaggtaatgcactgtttggtggttctgcgccttcggttgccttacagtttaaagctgccggaattgaaaacaccttctttatttatgtgattgtcatgctgattatctgtttcttgtgtagccttgcgcttccgaaaaaaccagattacttagaacatgatcattaattaaatgagatgccttctgtcccaagcagaaggcatcttttagctcttagcaaattcttttaaaaaagcccacggaaaaatccctttatcatgcccatcgctaaagcaaatttgggcaccataaccttgatcaaacatagctgtcacttcaacattttgatgctctattttaatttgtttaatccgcttcgctcgacaaaagccgcatgggcaaatttctcttaaactttgatgactcagacatacgcttgagccatcggtccatataaagtgaacctgcttatttatagtgtcgacacggatatcaggtctgatttgcatacttcacctcaccaatttgatttaatccaatacgaatcgcttttcgtacttcaggatctggatcattttgatgttgttccaatagcttctgagcttctgctgtaccaatttcaccgagtgctaaagcgacttctttacgcaagttactaatttcatgcttaaagttatcagtcaaatgagcaactgccagatgtgatttaagtagtcccaagctccgtactgccgcaatacgtacttgccaatacaagtctgatacagcatgaattaaaggagcttcgagctgaacaatacgtaattttccaatcgtaagagcagcttccactcttagttgccaactttccgaagttaaagaatgttgaagtgcttggataacttcaaccgatatgttctgactataagctaaaccacctgttgcaatacggcggacctcatcatctgtatctgtttcggcaatttttgccaatatcgtaattgcttggtcttgttgtaaccaacttaatgcactgactgcctcacggcgtacaaatgcatcttcgtggtgtaccaaagcagatatctcttcaaataattgctgtggtcgtaaaggttttaaagcacgcagaattgcaccaagagcaaaagtatccgtatgctttaaatacggtgccagtatctgggccgatgccgcatttttgacttcacttaaactctggctggcagcttgtctcacattcagatcaacatcaaataaggcttgagccaatacttgcaaactggttgggtcttcccagctttctagtttttttgccgcttcttcacgaactaaagctgaagagtcgtgttgtagtgctgcatgcaaccacggaagtaaactcggattttcttcatcaccaatattcattaaagcgacaaagcgtatcttttcatctgcatgattgagctgtgcaagaaattcctgattatattcatcgatatcatctaaagcttgataataaaaactcattcgtattccttaatttgtgatttctttccaagccctaatggatttaaacggcttaactcttcttgttgagtggcttcttttaacgtttggatgcaatgttttttaatggctgtaaattcactactcgttacaagctcaacatcccgtggacgttcaaacttaagtggaatttcttcaataattcgccctggtcgatggctcataatcaacactcgatcggctaaaaaaagtgcctcatcaatatcgtgggtaataaataaaaccgacgtttgaatttcttgccaaatttcgagtaatagcatttgcatttttaaacgagtttgagcatctaacgcaccaaacggctcatccattaataaaatgcgaggttgattaatcagtactctcgcaatttcaacccgttgctgcatgccaccagaaagttcagctggaaatttatgttcaaaacctttaagtccgaccagatcaatcattttctgagcttgttcaatacgcttttgtttagcgatgcctttcatttttaaaccaaaggcaatattttcgagcacgcttttccacggaaataaggtatgttgctgaaacaccaaacctctatctggatgcggttcaaatatcgattcatcatcaaccgttaaagacccagaactaatcggtaaatgccctgccaaagcacctaataatgttgatttaccgcaaccagatgggccaagtaaacatataaactcgcccggttgtatttcgaaattaacccgatctaatgcctgaaaacgatttttagcttgccctaaatgtagagatagattttgaatacgtacatggccttgtgtaactgacattttaagacttcctcaattgataccatggagtaaatcggtttccaatcacacgcaccaatgtactgctaaacatacctaacgctcctattagcaccatgccaaccacgatattgctatagttttgcaaggtgaaagattcccatgtgaagtatccaattccatgttgccccgaaatcatttcggcagtcactaaacagaaccagcaagtgcccattccaatggataaaccagtaataatgttcggtaatgcacccggaataatgacttcatgaataatggcaagatcagaagcacctagactttttgcagatgcaacgagtcgtggatcaactgcaccaacaccatgtacggtgtttaataaaattggaaataaagccccaataaacgtaataaaaatcatagacgcttctgaggatggaaaaatcagaattgctaaaggaatccatgcaactgctggtattggacgtaatacttctaatggtggcattagaaaggcagccagtttttgataacgtcctgccaacaaaccaatgcctacaccaattagagctgcaagcacaaaaccaaccactacacgaaatacactagattcaacatgttcaaatgcagcgctgagttgaaaaaaagcccatagcgcatgaatgacatctaaaggtgtcgggacattgctaaagttcacaaagcctaaatttactttaaactgagcaagtccttgccaaatgactatccaaaaagctatggatgtaaaagcaatcacgtagctttttaaacgcgccggatatgatctcaactgctgaaaaaatttagtcaaaaatgtactttggttattaggttttgtctgggctaaactactcatttgtcacctcctgatcattaggtaagacaacacatcagctctgtgttacaagttgaatagctttaaagtcatatacttttccgccctgttgtttagcccatttttcagcatcatcttttaataaaaaagcctgaatttgtcctgttttgtctgtggcataccatgccaaattggcaagtaacttaatgtcggactgatgatcttggctataaaccacacgcaccgtttttccatcggcttgtattttctttaaatcagaaaaagcatgctcaggcgtttcatagctacgaactttttcttcaccctttacccaaatttgagttacccgatcaaatgtcttgatgggttggcccgttaaagcatcattggcaaccaaaggtgattttgcatagtcagcaagttgctggctgtaattaagtccagatgcctgaaatgcatccttaatatattggtcatcaataaatttatttacatcaagcgtaccgtcgttttttcctaaaacttttaaggtatctatcgcaatttgagtcgcttttcgatattcaggtttccacgttaagtcacgagtttgcagacctaaagggccatgaaatagataaacaacttcggcaggaatacctgttttttcagcaataatttcactatatttttctggttgttcctgaatcagacgattcgcttcaatagttgcttgtaaataagcttttatgacttcgggatgctgctgtgcataatccttgctggcaagcgaaccatgaaatgtgggtgattttgcttgagaaccatcatagatttttttggcaaaaccttggtaagcaaataactcaccaaatggtacgaagtcagcatgtgcagaaattttatgactttttaatgcaggtcccgccacttctggcgcctgagcaatcactttaatatctttatcaagttgccagccttctgcctgaatcgctcgcagcaacagtccatgagcagttgaggcaaaaggtacagaaatggtttgtccttttagttctttgagcgatgttacttttgagtcaattggaacaacaatcgcattaccgctaccattaatactgcctgacaatggcgctaaaaatatgctttcttttcctgcctttttaaatgccgctaaattattaaccgcaggaaagtcggccattgctcccaaatctaaacgcccagccaccatctcactggtcagtggtgcaccagaggtaaagtttttccattgaatgtcatatttaacgtgtttgtatttaccatctttaggcaaatattttggtaataaattcaattcacgaatgagcaacccacctgttgcacagttaatagtcgtgtcttgtgtaccaatggctacacgcacagtttctgttttactgccgcaccccaaagtgccgagtaccatggcaccaattaagctactgagtaatagttttttattgatcaatttattttgtctcatgttacgtattccaaattaattatttgagtaggtatgggatatttactttgactgcatctgttgggcagtccttttcacaaggcatgcaataccaacattcatcaaattgcatataagctttttgagttgtgggatcgattgccaataaatccattggacaaacatctacacagacagtgcatcctttatcagcaatacatttatcttcatcgataatgacgggtgcgacagtacggtgctgtacttctttaaaaataaaagccatgatttgaattcctgatttatttagtctgctagagcaacatctttttgaatgcgtaaacggtcatacgacacagcttcatcttgattaatcggaaccagataaggctcgattggctttttgaaactgaccatattgccgtgttcatcttttttcaaatgcgcgtgacagaaccaatccgagttatttttttgagggaaatctgctctatagtggtacagtccccagcggctttcttctctaaacaatgaagctcttgctgccatttccgcacaatctcgaataaaagaaacttcagcggcacgcatcagctcatgtgggtttctggcagaaattcgcttaatatcctgtttaatttcttcaaaacgcttgagcccaatttgcattttttgacgagttttaggaggctgcaaatagtcatttacaaaacggcgcagcttatattccacttgttctggaggtaaaccttctgagcaatccagtggcgcaaatattcgagctttttctgcttctatttcgctttggtttaattcgctatcttcaattgcattcacgtattgcgcagcatttacacccgcaaaccatccgtaggtaaaagcaccaagcatatagttatgaggtacagccgccatatcgccagcactatataagcctttaaccgaagtctcggctttttcattgacccatacgccagaagcactgtgtccactacagaaaccaatttctgaaatatgcatttccaccatatcttgacggtaattggttcctcgaccctcatgaaaacgtccacggcttgggcgctcattggtatgcaagatttcttcgatggtttgaatggtttcttcggccagatgatctacttttaaataaacagggccattaccactttccagttcttggtaaaactcccacatcatttgaccactccagtagtcacattcaatgaaacgttcacctttactattggcggtataacctcctaaaggcccggtcacataggcacaagccggaccgttatagtctttaatcaatggattaatctggaagcattctaaattggctagttcagcaccagcatggtatgccattgcatagccgtcacctgcattggttgggttttcataagtgcccattaaatagccggaagctggcaaacctaaacgccctgctgcaccacaacataaaatggctgctttcgttttaatgacataaaagtcaccactacgacaatcaaaaccgagtacaccattgattgcaccttgctcattttttaaaagcttcgtagtgacaatccgattattaattttgacttgagcacgctttaactgacgatataaaacttttttaacgtcatggccttcaggcattggtaaaacatatgcccccatgtgatgtactttttttactgcaaattcacccgtctcatctttttcaaacttaataccccattgatcaagctgttgaatggttgtgaaactatgcttcgcatatgcatatacagtggtttggttaactaccccatcattggcaatggtaatttctttggtgtactgctcaggtgttgcgtagcccggaatgacagcattattcagtccatccattcccattgaaatcgctccactgcgctttacattcgctttttcaatgagcaagacttttaaattggggttttcttgtttggctttaatcgcagccattggcccagcagttccaccaccaatcaccacaatatcgaactcaagatatttagtttccattgaatattccttatttttatctgagttattaacgatgaatacgtaaacggtactggaaggtatcgcccgagaaatagagatattcatagtcaataggttggccatttgcgtcatgagtcaaacgttcgacccgtaataccggagttccgatttcgacttgcaacaaagccgctaattcttcatccgctaccgtggcatcaatgcttaaatccgcatgtcccaaaggaatatcgcactcttgttctaatgccttgaaaatatcggttgtacgtaaatcaatcgctttctctttaagtttcaaaccaatatgttctggcaaataagtcaactcatacgacactggttgacggttgagtaaacggacacgttgaatttcatatacattggctttaacgggtaactttaatttcggtactacgtacattgggatctgcttaagctcggccgagatgacacggtttaaaatttcatgaccagcagatgacattgcttctgcaaaaccttgcaaacttgaaatgttctggaacgtttttggcttacttacaaaggtccctttacctggcaccttaaaaatatagccttccaactgtaattggttgagtgcttggcgaactgtgattcggcttacaccaaactgttcagcaaactcgttttcagatggaatttgactcaacacggcatattcaccatttacaattttgttcaggatgagttcccttaattgatcgtaaagaggcttgtgatttttgggatcttggggtagctggctcacggctcacaacctgttataacaacttgagcaaataatgtttaaaatgtttcagctttggaaataatttaaagcgataactttagttaaaaaaataatttcattgaatatcaataaattaataaatagttatctataaaagttgaatggttatcataaaaaatacatttgtgtttgttatgctataaaacatactccgttatgccataaacgtaaaaattaatattattttttaggggataatatgcaacaaaaacaattaaatacccctgatgattcagtggaacaagtcaccttctggcaagccttcttattttggctcaagcttggttttattagctttggggggccagctggacaaatcgctgtgatgcatcaggaactggttgaacaaaagcgctggatatcagaaaaaagatttttacatgcactgaactactgcatgttgttacccggtcctgaagcacagcagttagcaacctacattggttggcttatgcatagaactgcgggaggattggttgcaggtattctatttgtattaccctctttatttattttaattgggctatcttgggtttatataaaatttggagatgtgcctgttattgcaggtattttttacgggataaagcctgccgtcactgcaattgtctttcatgcaacttaccgtataggtagtcgttcgcttaaaaataagtttttatgggtcgtcgcgattgcagcattttttgccatttttgtcttaaagcttcctttcccgcttatcgttttaacagctggtattgctggctatttagcgagtaaaaagtacccagaactattttcctccgcgggtgggcataaagctagtcaaaaagattatggtccggcatatattgatgatgatactccgacaccagagcacgctaaattccattggtcacggttagccagacttatttttgtggcaatcgctttatggctattgccaattttagctttaggcgcatattttggatggcatcattcctatacccaaatggcttggtttttcactaaagctgcgctgcttacgtttgggggcgcttacgcggttttaccttatgtctatcaaggggctgtcaatcattttggttggctttcacctacacaaatgattgatggattggcacttggtgaaactacacccggtccactaattatggtcgttgcctttgttggttttttaggaggcgttaatcattcattactaggctctgagcatttattttttgctggagcactcggtgctgttattgtgacttggtttacctttctattttcatttgtctttatttttgcgggtgcaccgattattgaatctacacataacgaaattaaatttactgcacccctcactgcaattaccgcggctgtggtcggtgtcattttaaatttagcactattttttagttatcacgtgttatggccacagggtttttcaggccattttgatattgtcgcggccctcattactgtagctgcatttattgctttattccgatttaacattaacgtgctgtatgtcatttttgcttcggcactggttgggctcgcagtcactttcttttagttatttactgattgaattaatttcttaaaatcataatctcaataaggccgaacagttcctttactgttcggctatttatatttttaacccgctaactgggcaatttgcgctgctgcattatctaaggcagcttgacgtgcttctggtccgaaagcgattccttcggcgcgcacaaaagtgatatcagtcaccccaataaaattgaaaaacgctttgatataagtttcttgatagtctaaagcttcggctggtgaaccttctgaatacacaccaccacgcgaagaagcaataatgacacgtttcccctctactaaaccttgaggaccgttttccgtgtaacggaatgttttaccagcaacagatagacggtcaagccacgcttttaactgtgatgggaagctaaagttatacataggtgcgccaattacaacgatatctgacgataagaactcatccaaatattgggtgtttcgtgcaacacgttgttgcgctgtttcattattaggttcaacaccttgccatgctaaaaactcagcatcagacaaatgaggaattggctctaaagcaaaatcgtgatgaataatttctgcatctggataagctgtgctgagctgacgaataacagatgaggtgagttggcggctaacagactgctcacctaaaatacttgtgtcaatttgaagtagtttcatcgcttatacctacagtataaaattgttacttgagctaattatgttactactattattcttatgcacaagaaggcacatttagggaaccaagtaatatgactgtaaccatacctcatgatatccagagttcagattgccaaagagttagtcaagtattggctagagttggagagaaatggagtatactcattgtaatgacacttgcatcacatcctcatcgcttttctgaaataaagagacgtatcaatggaatatcgcagcgtatgcttacattgtgtttgcgtggtttagaacgagatgggttgattaaacgtacggtttatcctgtagttccacctcatgttgaatatgaattaactccactgggccattcacttacagaacctgtaattgctttaggccaatgggctcagcagcatattgcggatattgatgcggcaagagctgcatttgacgcagctcaggagaaaccaattacattagacacttaacgtaactgcgaaggactcatgccataaaattgtttaaagcgatgacttaaatgacttgctgaactaaacccacatactagggcaatatcttgcaaagaaagctgagatgactgaattagccctttggccttagttaagcgtctttgcatgacatattggtgaggcgccatattcatggactgtttaaacatatgagcaaaatggtattcgcttaaattcacaatatttgccaaatcagacaaagtgagtgcctgatctagatgatcttcaatccattcctgaatatatttgagtttatggggtgccagtccgcccttgatagtaggctgttgccattgaacactactatattttcgaattaagtgattcaacaataaacttgccgttgtactcatttgcaaatgatttgaagaatcttgccaatcgcaatctaacaagaagaattgatataacgcccgaatccgttcatcatcattaaatacaacttcgtttagttcaatttgattcggctctttgtcccatattttttcagcaacatcacgcaaatgttggtcagtgtagtacaagtggacaaatttaagcccaccacgtatgtcccaagttgactcctgatgttcgggcaataggcaaaaacgtcccggcccaccaccatttttccagcccgcaggtgttttttgatagctttcataaccatcttgaatataaagacttagagtgtggtgatcgctacagacacttacacgatcttgctgattagaccaaaatgcaagttgcatattttcatcaagcaccacagtttcgtgaagcttggctttagactgctgcagctgttctaaagtttgataagccatgcaaaattaaaacaaatatgattgatcttaagttaaccatattcagcaaaattcagctagtttagatctataaaaaacgcaagatcttgcatgtagaacacaagaatatatacgtgaaaaataaagcattcctagatacttaagtttggtaatcgaggatgaagttatgaatattttactctatgttgcggtggtgttgatttggggaacaacatggattggaattgccgttcaaagccattatgcaacacccgttgtcgcaattttatggcgctttgctatttcagccttattactttgggttgttttactattttcaggaaaattacagcgaattgctttaaaagatcatttgttctgtatgctgcaaggactttgtgtttttggtctaaactttatttgtttttataccgccgttaaatatgtaaatagcggtttagagtctgtcattttttcgatggccgttttctttaatgccattaatgcgcttatcttttttaagcagaaaccttccccaaactttgcaccagctgcacttttgggcctaagtggtattgttttactgttttggcatgacctgattaatagccagtttaatgcgcagttattaatgggtattgggctatgtgcaataggcacttacggtttttctttagggaacatgattagtgttagacaccaaaaacgtggtctaaatatcttttcaacaaactgttatgccatgacttatggcgcattggtgatgttaattctggctttatttacaggacaagatttaatgccgccgatgaatttcccatttttaagctcggtactatacttggctgtatttggtacggttattgggttttcagcttatttttctctggtcggacgaattggtgcagccaaagcagcctatagcacgttgctctttcctttagttgctttaacagtttctactttctttgaaggatatgagtggactttaaatgctgtatttggaattttactcatcttacttggtaactacttaatgtttagtaagtttgaaattggaaagaagttatttagcagtcaaaaaaattgtgagaagcaggcataaaagcctgctttttttataaatcataattaattttagcagccagtttttagcatcaactcaaaatcttttaaagccgcggctgctgtggctaatggcgcagatgcccctccactgacaacaaattcccccatttcttgcgttaacacccgaatacatttattagaaccttgcagatgagcaaacggatgatttgctgggactaaccttaattcaacacctgtttgaatttgctgattcttaatatgaataaaaccaaccagacgaggaattacattttcttttttccaaccacgaatatgttcagccgtaacgtgactaattccttgtcttggaatatcttgaatttttacatcagcccccaaaacagtattggctagtatcgtaattttggcagcagtatcccatccatctacatcgaaagagctgtcaggttctgcaataccttttgcttgagctttttcaagagattctgcaaatgcgcattcgtgttgcaacatatcattcaaaataaaattcgtggttccggtaaagacaccttctatttctaaaatttggcagccagctaagttatattcaaacaaatcaaccgtcggtaaagctgcagcagtggcaccgctaaaaaatagttttttattgtgctgatgtgccaagttaattagttttttaccttctacgactaaagcacctttagataccgcaatcgcattcatgttatttgttaaagcataatttaaataaaataggccttttccacctgtcacatagtcacttggtccagtctcaataatgacatctgcttgaaccttttctaaaaacttttgctctgttaggcctgcttgatattgtgttttatctagccactttgaagcttgtaaaccatcttggttaattaaacctgatgatgagttgcagacacccactaaacgggcatcaatttgatatttttgtttatagtatgtcgatcgatttaaaagaagctctgcaatttgttgcccaatccgtccaaaaccacaaattgctacattaattcgcttcatttcactttctcaaaaatttaaatggtttaaatcaattttccaaagataattttaatatctcatcttggaaaaattgctatttatagagaaggttaaaatactatatcgctcagatatttgttagattaacaatcttaataaccatataaattgcgacagcaaaaaccattaaagcaaagaccttttgtacaattgcagacggaataaaccgaatagctcggcgtcctaataacataccgaatgcacatgcgagtgcaaacgcactagtaatggcgactggatagtgaaagccctctgcaatatgcatcacaatactcatgccactaatcaggaaaataatcataagtgaggttgcaacaatgctatgcatatccaaatttgtgacttttctaagcgcgggtacaattacaaagccgccacccaccccgagcatcccagttaaaagcccagcaataatcccgatgctcgcaagcacaccaccagttttaaaattccagataaagcgtcccgtacttgggttgacctgacacggcgggttatgaaaatccgaaattcggttactaataagtcgatagccgactgtaaacatgaccaagctaaacattaacatgagccaaataggtgaaattgtgttagctattaaaataccgatatgtgccataggggcaccaattaaggcaatccagattgcagcacgataacgaactatctttttaaataagccttcaatagttccaatgagtgtagatagcgcaactgctaataacccaatcggtgcagcttgcgccacgctccagccttgactggtcataagcgcgggtacagcaagaatgccaccacccgcaccggtaagaccaagtaaaaagccaatcacaatgccttcaacgacaagtaataacatattaaaagcctaaaattgcatatacatcgtttgcagtagactgctggttaatgagtgagttgatctcgtcctcttgcgaagctttagtcacttctcaggacaaagcattgctttgtttatcctcttaactcgaacttagttctcgtcttcttgcgaagctttagtcgcttctcagggcaaagcgttgctttacttatcctattccactcgagcacagctctcgtcttcttgcgaagctttagtcgcttctcaggacaaagcgttgctttgtttatccttgctcaggtttgaccatccactcgcggcccttgagcatgccttgccaataaatcggcggtaaaatccgctctttaagcagccaagccaaacgggaaggtttttgcccatcaattacccattttggaaaacttggaagtaatttgccgccgtagccaaactcagccagaacgatttttcctcgttctaccgtaagtggacatgagccatagccgttgtactcgcagaagtttttctcacctttgagctgggctataacattcacagcaacgatcggagcttgtgtccgtgccgcagcagcagttttggcattaggtgcattcatcacatcgcctaaagcaaaaatattggcatgttgtgtgtgttgtaaggtttgaggattcacactcacccagcctgcttcatcagtgagtgtactggcacgaataaagtccggggcttgttgcggtggaacaacatgcaacatatcgaaatcagtctcgaccaatgctgcattttcatcgttcactaccttaaaccatgctttttttgcaggcccatctactttgacaagttgatggttaaaatgcagttcagtgccatatttttcaacgtattgcattagtgcaggtacatattccttcacaccaaataaaacagcaccagtgttataaaaatggatagagatatctttaagtttgccttgctttaaccagtagtcggctgaaaggtacatcgctttttgaggagcaccggcacatttaatcggcataggcggctgggtaaagattgcctttccactatttaactgttgcaccagttcccatgtatatggcgccaagtcataacgatagttagacgtcactccatttttacctaaggtttcaactaaaccttcaattccatgccaattgagttttaaaccaggacagacgaccaacgctttatattgaataggttggcatccttccaaaataacctgattatgctcagggtcgaatccagcaaccgcagctttcatccattttacttttgaaggtatcacacttgtcattgagcgtgcggttacttgtggtttgaaaataccaccaccgaccatggtccagcccggttgataataatgtgtatctgcgggatcaataatgacaatatctaaatgaggttcacgacataaaagactcgacgctacagaaattcctgctgccccagcgccaacaatcacaacgctataacaaggaattgtggctggttcatgatcacgttttaaaatacgtggcaccaagccttttaagttaaacccaagcttattacccgactcaactaacagtgctgcatcttgtggagcaacttcagccaaagcccacaaactgattgcacgcataccagagcgacaatatgctaaaacgggcttctgagcattctgataaagctgcttaaactcggtaacttgttgatcgctaattttaccactgataacaggctgatagattacgtttaggccatgtcgctgagctgcttcttcaatttcaatcacattgggttgatctgcaccttccccatctggacggttacatatcagagtttttattccttggtctgcaatttttacaatatcgttggcagtaatctggccagcaacataaaaatcttgattaactcgtttaagttccatattgccaccttataattgtgaaattgagccgcaagcctgattagcaggaagtgctttatcaatttgttttggatatggcagatttaagttattcattaattcaataaaatcttcacgcgagcgattctgacctagacgtgaattatttaagcgttcataaccaattgttgaagacagacgacctttataatcgtgtcccggatacacaatagtctcgtcaggcaggctaaaaagttgtttatgaatactgtcataaagtgtgcctgcattaccttgctggaagtcagttcgaccgcagccgtcaattaataatgcatcaccagtgaaaatcatgtttccaactaggtaactcgtacaagcattggtatgacctggtgtgtaacgcgcttcaatactgaggttgccaactttaagcatgcaaccatcagtaattaaaatatctccgcaacttacttctgagtttcggtgtaaaaccgatttgcaatgaaaccgttcacgaagtaaatctgcagcggtaatatggtctgcatgaacatgagtatctaaggtatagatgagtgtaaattgatgctgctctaattcttttgcataaatctctatatctgatgctactgggtcaattaaaacagcctctcgtgtttcttcacacccaagcatatatgtataagtcgaactttcctgctcaaaaaactgcttaaagaacatgatttataccctaataatttatttctttcctatattttgcaaataagatgccaattatttaaaattaaataataaatataaaaatcaaaaacttaatataataagtaaaactaaacttagaaaatgaactcagcttgatgttcctatgaaactcaagtatgtttcaatgaaacgattgtgaaacatataaaatggcaaagctaaattttgagtcagaacagaatttttatattttatttgagcagcttaaggctctcttcccaaatgcgagcctgtttttagcagacacaacgactcaagcaattcactataaatttaatacagatgacatttctgttgagagcatggcagcgcttactcaagaccatcataatcagtatcttgaaattaatactcctaaaatgagaaagcgattcatctatcaagaacatgatatttacatcgcagagcatcgcattatcgggaaattgcatattctacagcccgttagcatagagaatgatattgctgatcaagtagagctaacagaacaattgcaagacttggctaaagtttttaatagttgttcaccagaaatggcgcgtatgttttcaattattcaaagagtggcaattactgagtttcctgtgcttgttcgcggtgaatctggtagcggtaaagaactggtggcacaagcaattcatgattatagccaacgtaaaaataagatttttgtagcgattaactgtgctgctctcaatgccaatattctagagagtgaactttttggacatgtgaaaggtgcttttacgggagcaattcgtgaccataaaggcgtgtttgaacgtgccgctggtggaacgctgtttctggatgaaattgccgagattcctttagagcttcaagctaaattattacgggtgttagaaacaggtgaatttactcctgtaggtggtgaaaaaccaattcaggctaatgtccgcattattacagcaacacataaagctttacgcgaagaggcaaaggctgggcgtttccgtcatgatctactctaccgtctacgcgtaattccaattttcataccaccactcagagagagaaaagtcgatattcctcttattgtcgatcagattttaaaagaaagctcaacccaactcgatacaatgcctcgacatgtcaatcagaaagccatgcaggttttattgaactatgactggccaggaaatgttcgtgagcttaaaaacactctgctttatgctttaaccatggcaaatggtaaagatgaaattgaaatcgaagacttaccaaatgaactcttaaatgcagatgattacgttaaattacccgagacaaatgcagagcttagtccagaaaatgtacaagccgctttagaaaaatataatcataacctgaatatggtcgcgaatatttttggaattagccgcactactctttggcgatacagacaaaaacataagctttagctaggtatttagctcgtctaaagcgtatcatattgcacttggttaggttcgttagttcaaaggctttatatgattgttcgtgataaaagcaatgtatttaaattattatttgcttggaaaggaacaattttgccgaaggttttgcctgcactgagttttgttgtacttatttcagcctgtgtggtctggctctcttattatcattggattcaaattcctaccgtacccgcgatcggatttaccatctttggcgtgattctttcgatttgtacaggctttagaaataacgcatgttatgaccgttggtgggaaggccgcaagctctggggtgctttaattgccaatgccagacatattgttagagatagccatgttttatctaatgaacaacgtgaacatttaattcatcaggtcttaatttttagtaatttattgcgtgatcgtttacgtcaacaaacagtcgaacccacaaaatttcttgagcatgcctatttaaataactcttcacttaattatttaaatgagcatattaatgcacctcaatttgtactcgaaaatattcaaaaagatttagtcaaagctctaaaagacggcgaaattagtgacattatctatggcactctgacacgccatattgttgagctcggcaatatccaagcaggttgtgaccgaattgctgggacacctttaccctactcatattcagtacttttgcaccgtgctgtttattgtttctgcttcatcttaccttttagccttgaagctgctttaggcatttggacaccgcttattgtcggcttaatcgcttatatgtttttaggactagatgccttaagtgctcaaattgaagaaccttttggcttgcaagaaaatgatttaccgctcgattctattgtgcgtttaattgaacgagagtctctaagctctttagggcagccattaccgcctattattgaagcccaaaacaacaatttactttaataaaaaagagcgatgattcgctcttttttataggcttaagtgtctatttatggatgtacaataatcttaacggctgactcattgttatgaattaaggtttcaaaaccttgtgaaatcaaatcatcaagttgaatgcgctgcgtaataaaaggttcaagatttattttaccttcttcaaccagtttaatagtctcctgatggtcatttacataggcaattgtgccgcgtacatcaagctctttcattaccacactgtgcacattaattgatgctgggtggctccaaatcgaaacaataactataacgcctgttggtttcactgccgcgaccaaagtatctaacaccttgttaacgctactacattcaaacgcaacatcaacaccatcgccattagtaattttcatgacctcagaaacaacatcaacttctgacgggtctaaaatataatctgcaactcccgactctttggctttttctttacgtttggcacttagttcggtaatgatgaccttaagccctttcgcttttaaaattgccgaaagcaataaaccaattggccccgcaccgccaaccagtgcaatatcaccggcctttgcaccactacgtacgaaagcatgatgacccaccgataacggttcaattaaggccgcttgatctaatggaattttattggaaattggatgcacccaacggcgtttaaccgcaattttctccgataagccaccgccacgaccgcctaaaccaataaagttcatatttttggaaagatgataattatcgcccggtccagtcggcacatcatcagccacaatataaggctctacgactacatgctgaccaatttcaatatcatcgacaccttcacctacggcataaaccacacctgaaaactcatgtcccatagtaatcggcgcagattcgcctgaaataggatgcggatgtccacacggtggaataaaaattggtccttccataaattcgtgcaaatctgtaccacagattccacaccaagctaccttaatgcctacagtgccgggagtgacttctggttcagggatatcttcaatacgaatatcacctctgtcataaaaacgcgctgctttcattattatctccctcaaatcaggatgttgttttagcgatagacaattccgccgtccgttaaaatggattgacccgtaatatagtctgaatcttcacttgccagaaaagcaactaatgcggctacatcgtctggtgtttgggctctacctaaagcaatgccttccacatactttttataagtttcaccaattgcagcaccggtaatttcagcaaaacgtttatcgatttcaacccacatgtccgttccgacaattccggggcaatatccatttaccgtaataccgtgactggcatattcttttgccgcagcttgggtaagtgctcgtaccgcaaatttggttgccgagtaaataccgagtaaagcaaacccatcgtggcccgcaattgagcaagcattaatgattttacctttatgttcgcgttgtttaaattttgcagcagcagcctgtattccccacagtactccaccaatattaatatcaacaattttttggaattcatcaggtgtgatatcagcaatcgcttgaacttgtgcaattccagcgttattaatcatgacatcaaacccaccaagagcctgctcagcatgatttatagcagcatacacttgctcgcggtcactgacatcagcaataaatgtgctcgcatttacacctaaagcttgaatttcctgctgcacatcgttcagtcgatcttgtttcatatcaactaatgcaatatgtgctccttcttgcgccaagcgcagggcaatcccacggccaatgccttgggctgccccagtcactaaagcgactttattttgtaatcccttaaccatgttcaactcctgtaaatgtagaatttctacatatgaatcgctcgttgcattgaagccaaaatggattcatgcatggcttctgataatgttggatgcgggaaaatcacttgagctaaactttcatcagttgcttctagatatttcgcaatcgcaaatccttgaatatgttcggtcacttcatggcccaccatatgtgcaccaagtaattcacccgtttctgcatgtaccaccgttttaacgaaacctgacgcatctccaattgctaaagctttaccatttgcagttaaagaaaacttaccaatacgtataggtagattcttagcttttgctgcattttccgttaaaccaatacttgccacttgtggatgtgtaaaaatacaaccgggtatctggctacggtcgagtgaatggacgtttgccacaccagcgattttctcgacacatatcatggcttcatggctcgctttatgagcgagacaaggcgccccagcaacatcaccaatggcataaagccctgctacgttggttttacaatagtcatcaattgccacaaaaccttgtggattgagttctacacctaaacgttctagtcctagccctgtggtattcggctgtacaccaattgccgaaagcacgcggtcaaaaacaagcgtttgaacatcatttgccgtttcaaccacacagtggacttgctcattttcaatctgaatactttgaacgacagcatcggttaagactttcatacctttttgttcaaattgttttctgacaaattgggcaacttctgcatcttcggtcggtaaaatttgtttagccaaatcaataagggtcacctgacatcccaaatcttgataaaggctagcaaactcactaccaattgcacctgaacctacaaccagtaaacttttcggtaactgctctggaacaagcgcttctttatagctccagacatatgttccatcgacaggaagttgaggaacatgtcgggctttagctccagttgccaaaatgatatgtggtgcactcaaagcctgcctattaccttgagcatcggtcacttcaattttttctttcgctgtaagttgagcgcgaccactaaaaacagtgacctgattctttttcaacaagtaatcgatgccttgtactaattgagctgacacttgtcggctatgttgcacaagcttttgaatatcaaaatcgagttgggatacctgaaaaccaaactgtccggcatgtttaaactgggttgcgagctctgcccctgcaagcaaagctttggttggaatacagccccaatttagacaaattccgcctaaatgtcgctcttctacaattgcggtttttaacccgagctgggctgcacgaattgcagccacatacccacccggtcccgcgccaatcacaattaaatcaaattgagcttctgacatgcgggttctcctacaccaaaattaaagcagggttttcaacaaactgcttaaagctggccaagaatttcgccccaactgcgccatcaataactcggtgatcgcatgacaacgtcgctgtgacaatctcacgaaccactacattgccattttcaacaacagcacgagattccgaagcacctaatgccataattgcaccttgcggtgggttaataatggcatcgaactgtttaatgcctaacattcctaaatttgaaatgctaaagctaccaccctgaaactcgtcaggttgtaacttgccagtcttagcacgagttgccaaatcacgcatgtcatcggaaatttgtgccaacgatttttgatttgctgcttttacaatgggtgtaattaaaccgtttggaatcgctacggccaccgaaatatccgcttgagagaactgtaaaattgattgagtcgcctcatcaaattgaacattcacttcaggtactttaatcagtgccgccgccgctgccttaattagcatgtcattaatagaaagtttcacttgtggaacagtctcattaatctgcttacgtagtttttgcaaagcttctacgttgagatcgaccactaagcggaaatgcggtgcgttacgttttgcagcctgtaaccgtgaagcaatcgctttacgcatcccattcatcgccaccgtcgtaacggttgattgtggttgagttgcacattgcaaaggttgttcacttaccgacactgggttattacgatagtaaactgcctcaacatcttctttacagacacggccacgagtacctgaaacacggcagtcatttaggttaatgccccattgttttgctaaacggcgtgctacaggcgtcgctaaaatttggctatcatcagctgtagatttaaccactttagtttgagtttgctgcttaacatcaggccactgaccaccagcagcctgtacagtcttctggatgtcttgaacactaatacgtccttcacgaccagaacctgtgacttttgccaagtttacattgtgcttttctgcaagctttaacgcatgtggtgttgcaaacaaatcatcagatgtttgatagccttgtaatgactctggtacagcgtagtcccctttagctacctttgcaggagctgaagcactagctgctgtagtcagtggctgttctgctttttcagcaacaggtacagatgtttccgctttactttgttccgaaggtgctgcaggtgcttgagctgctgaaccacctagtgatgcgataaacttttcaatttctgcatcagaaacttcattatcagcacatacggcaataagtccaccaacaggtaaagtatcaccatctttcgctaaaattttacggagcgttccagcaaaaggcgcttctaacacattgacgatttttgtggtttcaatttcacaaatttcatcgcccttattaaagctatcaccctctttaatcaaccattgggcgatcgtgccttcttccatggataatccccattttgggatctccagcgttttaatttcgctcatcctaagcctccaatgtttttcgcacagcttgctcaatacgctctacacttggaatccattctttttctaaaactggagagaatggaacaggcgtatgtggtggcgttacaagttcaacaggtgctttcaaatagtggaaacctttctgtgcaactagtgcagcaacatcatgtccaaaaccacaacgtgcagctgattcatccacaataaccacacgtccagtcgacgcaacagactctaaaattccttcttcatccagaggtgaaattgtacgagggtctaccacttcaaccgaaataccatcttttgccaatttgtctgccacttcattagcacgatgtaccatcaagcctaaagcaataatggtcacgtctgtcccttcacgggtataatttgctacaccaaaaggaatagtataggcatcatctggaacttcgcctttaatgtcataaagcattttatgctcacagaacactacagggtcatcatcacgaatagcctgaattaacagccctttcacatcatatgggctagatggtactacaacttttaagcccggaaccgcagcaaatacgttatatggtgactgagaatgctgagctgccgcagagaaacctgcgccaatcatgccacgtacaaccattggtgcttttgcttttccgccaaacatataacggaatttagcggcttggttatagagcatgtcatgacacacgccatagaaatccataaacattaaatcggcaacaggacgtaaacctgttgctgcagcaccagcagccataccgataattgcagactcggtaattggcgtatcaataacacgttccgaaccaaattctgtccataaacctttggttacgcccaatacaccaccgaaaccttctaactggttttcttcagtgtttttaccgccgtgtccaccacgaacatcttcaccaacaacaaatacggttggatcacggcgcatttctgattcaatggcttctttaattgcattacgaaaacttttatttggcatctttactattcctttagtaagagacatagacgtcagtaaggagttgttctggtttcggatatgccgcagcacgggctttagcaacggcatcatcaacatttgcctttgaagctgcatcaatctcgtctagtttggcttcatcaattttgcctttgactttctcacggaaaattttcaaaggatctttattttctttgatgaactcgacttcttctttagaacgaatcaagccaggatcaccttcgaagtggccataaaaacggtttgtgatggtttcaatcacgcttggaccttcaccacggcgcgcacgttcaatggcagtttgagcggcttcatagacagcaaagaagtctgtaccatcaactttaactgccggtaaaccaaagcctgctgcacgaccagcaatgtctttacttcctactgcgtaatcatgaccagtaccttcgccaaagccgttattttcaaaaacgaaaattactggaagtttaagaacaacagccatgttcatcgcttcaaaagtaaggccttggtttgaaccaccatcacctgtaaaagacagtccgacgccaccagtctttaaggttttcgctgtcaacgctgcaccaattgctaaaggaggcccaccacccacaatcccgttggcaccgagcatacctttatctaaatcggcaatatgcatagaaccgccttttccacggcatagtccgtcatctttaccgaaaatttccagcatcatggcgtgaatatcacagccttttgcaatacagtgtccatgtccacggtgtgttgaagtgatatagtctttgtcggttaagttttcgcaaatcccgactgctacagcttcttctccgctatataagtgaataaagcctggaatatcaccattggtattttcttcatgaagtcgatcttcaaattcacgaatatcacgcatgcgtttatatgctgcgagtaattgctcttccgttaattgcatatccttttcctttattatcttgattattaaaaatcaaccaagtttcagcgagttttatatatttcgctataaataataaagctcaatttaatttaatatgctattagactaaaaagtttaaaataagttttttagctattaatttttatttttcacaaacttacgccacaaaaataaaattaaaaaattttaattcatttcatatacttgtaaaacaaacctttaaccaacctttattaatttataatatttgctgtgcactatacgcattaataaattctttatttcttatttatagaaataaggttttttattataactagtctagttgcaaatttatttaatataaaatggaattttatatatggacttaaaaaggcaaatagagacaggtattaagttaagaggaatagataaagtttctcgtattcctattaaaattttacctaccgaagaactacctaaaaaacctgaatggattcgagcaaaaataactgatttcgaagaaattcaacgtatcaaaaatttattacgccaacaaaagctacatagtgtttgtgaagaggccgcatgtccaaatctacctgaatgttttggtggtggtacggcaacatttatgattatgggagatatttgtacaagacgttgccctttctgcgatgtagcacatggtcgtccaatgcctttagatgaaaatgaacctaaacatctagctgagacggtcgctaacctaaacttaaaatatgtagtcattacctctgtagaccgtgatgatctacacgatggtggtgcagcacattttgtgaagtgtattgaagaaatcagaaaccgttgtccagatacgctaattgaaattttagttccggactttcgtggccgtttagaaacagcactctctacattaagcttatcaccacccgatgtgtttaatcataatattgagacagtgccgcgtttatataaagcaatgcgccccggttcggactatcagcattcgttaaatttattaaaacgttttaaaaaatactgtcctgatatcaaaactaaatgtggcctaatggtagggttaggagaaattgaagctgaggttattgctctactcaatgatttaaaagatcatgatgtagatttagtgactattggacaatatttacagccctctaaatcacatgcccctattcaccggtttgtgaatttacaagaatttgaaagatacactcagcatggccagcgtttaggctttaaaaatatctggagtgcgccaatggtccgttctagctattttgccgatcggcaatatttcggtgaatctgcaccaaagccattttcaagagaggatgttttgtcatagggcgaggcgaaataacaaaacttacccaataggataatagtcaaaccgtttaaaattatttaaggtaaatgaaataacgaggaaatagtcacaataagaaagctaaacctgttgagcggccacggatacgccatttcaacgataaaggaacttcgatatggatatgtcaaaacaattattattgccttctacagacaaccttccgtctttctttagaccggaaacaatctctgaaacaccttgtttaggaaaaaagccgtcactcgatctagatgcggctcctatatttgatctagatcaggaatggcaacattccttattcggtcgttcaatccaagagtgccatagaaatttgatgcatattgctgaagatgcagatatggcaattggggtgactgaccctcacggtactttactctggacatggagtagtacgcctatgcgttcatctgccgaacaagtccattttgttgaaggtggacaatggtcaacccaagcagttggtcaaaatgcaattggtcttgccctaaatacacattctgcaagttgtgtttattcacatgaaaatcagatgaacagcgttagagactgggtatgttatgcagcgcctatcaccgatgcaaacacaggccagttttacggcattatgaacttatcaactaaatatcaaaagcataactcacttggaattttagctgttgaacgctgtgccgatattgtaaagcaagccattcaacttcatcaaaagaacattttatatattaaggcgctaggcacgcctaaggttcaatacaatcaacatggcttgacactcacgcagcgtcaaatcgaaattttatgtattcttgctttatgtccggaaggcataaacctagaagagcttcactatgccttatatggcgatcgaccagtgagtaccactacactaaaagctgagctctcacagcttcgaaacctgattcccgatgtgatcgagtcacgaccatatagacttaactgtgaaattcaatgtgactttctcatggctgagcaagcactaaacttaggttttactgcaaccactttaacactgtatagaggtagttttttagccaagtcagaaagtccgtttttgtgtgcttggagagattgctttgacgcccgcttgagtcatgttatctataaaattgatgatgtagaccaactattacgtgtggttagccgtgttcctgaccgtgttgatgcagttgagcgcttacttgaacttctgcctgaagaaacaccttatcgggcaaagctcttaaaattgcttgaataaaataaaagggagaatatgtagaatattctccctttttaagatgagatcaagcagaggcttgaagctgtactctatagcaatcgtctaaagctaattcataataccgcagcccttcttccgccgcatgaaatgctttttgctgccaatcaggacgttcattacacaaacgtttaatcagctccatggcttcataaggatgtaaatcatcataatgagcatgtgcacgtaaccaggctaaagaacgcttatcaatggtaacttccggatgatccgtataagcgtgtatgcctttatagacttgaatagaccagtcacctgtcgcccattcaattgccaaattggtcgctgccagacattcagccaagttgccacggtgactcatattccaaagaaaatgattcaccgcattcatcgaagctggtgggcgaacactatcgagttgttctaccgttaatccaaaacctctagcccaatcccgataccactgtaaatggcgctcttcaaccttaatattttgaattaaccaatctcttgtttcagtaacgccaggttctgcaaaagcagttgctttagctaacgcaccagccatataggacgggaaatgcgctactaatggatagaaattaagtaaagcataacggaaactttctaggctcaatcccccattggccatttcagtaaaaaacggatgtttactcacccgctccttcactggtaaaagatcctcccaaaaccgctgagaccatccattatgcggcgtaatttctaaactcattccatattgatttagagcagtcattgctaattttcctatttatatgacagcaatcatctgtacttcacggctataagtctatccgaaaatgataaagatacaatctttaatcgaccatttgtaattttttctcaaaggtttcgaatctttagataattgtgacgctaatcattgaaatgtcgtgatttttatcacaattagggggcgtaaaaatcattacttttttaaaaaatctgtattattattttaaataaaccacacattatataaccaatacttttagatggaactttaataaaacaagtctcattttatgccaacttccaatatagagagcattaattatgaagttgcaaggttccaatatattgggacaggaacaaatagatttattaaccacacgcggattaaatttcgtatggtttccaaagcaacttgaaacgatatatcgttttcaatatcaaaatggtgcagcctatgagtttcgctatagagcacctattattttaatattatatttatttttaagctttggtatataccaagtcttaccaaccgaacaagttttatcctggttaagctattattcttgggtaggcataattgttttaatcgcctggattttatcatttattaaaaaattaaatcagtggtttgattattatgtcggaattggctcttccgctgccgttgccataacatttattttaattaacgttttagaaaatggccaagataatgtactttttcatgcagcaatgatgtatgccattgtgattatctatggtgcggtaggcatgcgtttttatactgccattattgcaggatgggtcggcggtcttattggtattttggtaagcacctatttgaacggagacatagactggaccttcttgaaccgtacatatacgtttagtagtttcttaggcatgacccttgcctatgctacggatcgtcagcaccgtgaaaactatttacaaaactgtatgattgagctcaaccgtattgaactcatgcaacaagctcaacaactgtcactgctttctcaacaagatgctttaaccgggcttgctaaccgacgttatcttgatgaaacacttgataatgaatggcgacgcgcattacgccatgagactcctcttactattatgatggttgatattgacttctttaaaccatataacgatagcttaggccatctcaagggtgatcagtgtttaaaagatattgcgactgcaatttcctcaattgctgctcgtagtggcgatttggttgcccgttatggcggtgaagaattcttacttctgttcccaatgacaaatgcacaacaagccaaaattcaggccgaaagattaatgaatgcaattaagaaaattgctattgttcatccatgtagtagtgtttcaccatacgtaaccattagtgttggcgtggcgaccacaattccacgtttaaatgattcaatttctgcttttgttagtcgtgctgatcatgcgctctatcaggcaaaaacaaatggccgcaatcaatatcaaattgctttgaatgaagaacaaattgtagatctaacttaatgatttatttttaaggtaatcatgtgatttcaataaaaatagaaaagccacataattttgtttatgtggctttttaaatacgctgattagaactgactatggttcgattggcgcaaatggaggaacaacatccgcgttttgagcacggtggcgtaagaaatgatccattagaactatcgctaacattgcttctgcaatcggagttgctcgaacgcccacacacgggtcatgacggcctttagttaacacatcagtatcttcacgatttaaattaatcgttttacccggagtagtaatacttgctgttggttttagtgcaatcgccacacgaatggtctggccacttgaaataccacctaaaataccaccagcatgatttgctagaaaaccatggctagtcaattcgtcacgtgtttcatgtccgaactgtcctgctacagcaaaaccatcaccaatttcaacacctttaaccgcattaatactcatcattgcatgtgcaatatcagcatctaaacgatcaaagacaggctcaccccaacctacaggaactttttcggctaaaatttctaacttagcaccgcaacttgtaccttgctcacgtaaagatgtaactaatgcttcaaaacgaggaacagcatctacatcgccacagaaaaatggattatttggaacttcattccaatctagtttttcagcaacttcattaccaatttgagtcacatgaccgcgaatcacaacaccaaatttttctgctagatatttcttcgcaatagcaccagctgcaacacgcatagcagtttcacgagcacttgaacgaccaccgccgcgatagtcgcggaaaccatacttttgcgtataagtgtaatctgcgtgacccggtctaaaagtttgtgcaatatttccataatctttcgatttttggtctgtattgcgaatgagtaaaccaattggcgtaccagtagttttaccctcaaacacaccagaaatgatttcaacctgatcaggctctttacgctgagtcgcaaatttcgaggttcccggcttacggcgatccagatctttttgcaaatcttcttcagttaatgcaaggcctggtggcactccatcaacaattgccattaaaccaaccccatgcgattcaccgcatgtagtcacacgaaagagttgtccaatactgttccctgccatatgtacaactccttaaacttgttcttcaaataattttctataacgacgacattgttcagcagtcaaagcaaaaatacctgaaccacctttttggaaagtaagccagttgaaatcaactgtattaaagttttggcgcattgcccattcagagttaccgacttcaataacaataagaccatcttccgttaagtaatctgccgcttgagcaagcattttacgaaccaggtctaaaccatcttggcctgctgccaatgcaagttcaggttcatgtaaaaactcttccggcaagtcagccatgtcttcggcatcaacatacggagggttacttacaattaaatcgtattggttttcagctggaattttttcaaataaatccgactcaagtaatgcaacttggtattgtttattgtgatgttcaacattaattgatgctacttctaaagcttctttagagatgtctgttgcatctacttctgcatcaggataagcataagctaaagctaccgcaatacagccagaacctgtacacatatctaaaatacgttgtggagttttaggcttggtattttctggtaagttattaagcgcttcacgcatttggccattttcatctaaacaatatggcgcaaaacgttgctcaattaactctgcaattggtgagcgagggataagtacgcgctcatccacataaaatggcttattaaagaaataagctaaatttaataaataagaagtcggaatacgctcattaatacggcgttccaacaagcttaagaattctgctttttcacttggtaaaagcttcgcatctaaaatctctgaatctgctgaccattcaagagataaggtttgtaaaactaatgcagagctttctgcgaaataatcttcagtaccttgtcctaaatgtgcatcatattgacgtaatgctgacaccccaaaacgaataaaatctcgaattgttgataaattttcagcagcttcctgtaaatgttcagggctaatcgtcggtcgctccacttaggcgtctccaaaggcaaattttgcaaagtgactattctactgagtgaggtagtgcaaagcaacgctttgccttgtgaaccagtgttttacatatctatctcgaacagtcatggctcaaaaacaaaatactttgttttaattaagaaataatgaacttttaagtagggtgaaatttagtctataaaataaaaaagcggcctttcaaaatgggccactctttaagtatttttagtttaaagcttaagtttttctgccacataatcagaatctttatcgccacgacccgacagatttaccacgatcatggtttctttcgacagttttggcgcttcacgtattgcccatgcgacagcatgtgagctttcaagcgcaggaacaataccttcaactcgtgataaggtcataaacgcatctaaacattcttggtcagttgcaatgctatattccacacggcctaaatcttttaagaaactatgttgtggcccaacaccaggatagtccaatcctgaagcgatagaatgcacaggtaaaggttcaccagcctcattttcaagaacataacatgccataccatgaatttggcttggtttacctaatgttagggttgccgaatgcatatttgtatctagcccatgcccagcaggttcaactcctacaagtttcacatctgaatcatttaaaaaagctgtaaaggcaccgattgcatttgaaccgccaccgacacatgcgacaacataatctgggtttttaccaaatcgttgatgcgtctgctctttaatttccttaccaataattgattgaaaatctcgaaccattttaggaaatggatggggaccaaccacagaaccaatcgcataaataaagtttttaggatcttttaaatattcttcaaacgcgctatctacagcatcttttaaggttgctgtaccgcgagttactgacaccaaatgagcgcccaaaattttcattttgaccacatttggatgttctttttcaatatcaacttgccccatgtggatttcacatggaatacccactagagcacaagctgttgctaaagcaaccccatgttgacccgcacccgtttcggcaataactttctttttgcccatatatttagcaagtagagcctcacctaaacagtgattaattttatgggcacccgtatgatttaagtcttcacgctttaaataaatttgtgcgccacctaactgttctgaaaggcgttttgcataaaataaaggacttggacggccgacataatttgcaaagaggtctgctaattcattttgaaattctggtgtatggcgaatttcttcataagcaacattaatttcatccattgcttcttttaaatgcggaggaataaactgacctccatactcaccaaaaaatccttgttcatttggtaaagcaataccattaatttgatgttgcatatcatccctctttttaaattattaaagttatcaagtttatcgagaaaggtaacgcgttaagtcctcaatgccttttagagtcattggatacatgtggttttcaaaaatctctttaatccaaccaattgtttgagtgtaatgccaatacccttctgtttcagggtttaaccatgctgttttatcaaaatgctgacgtaagcgacgtaaccaaacttcacctgcttcatcattcatatattcaaccgagccacctaccgatttcagctcatacggtgccatactggcatcacctacgacaattacacgatagtcacgtccataggtatgaaacaagtcccatgtgttcatgcgagtagctgttcttcggtagttatctttccaaacatagtcataaagacaattatggaaataaaagtattcaagcgttttaaattctgttttagctgcgctaaataacttttcacattgggcaatatgtgcatccatcgaaccacctacatcaaacaacatgagcactttgattcgatttcgacgctctggcaccatttgaacgtcaagaataccctgcttggccgtttcacggattgtaccgtcaacgtctaactcttcggcagcaccgtgtcttgcaaatttacgtaaacgtcgtaaagcaatttgcatttggcgggtaccaagaacttggtcatcatctagattttggtatttacgctgttcccagactttaaccgccgaacgcttacggcccggcccaccaattctgatgccttccggatggtcaccaaaagccccaaaaggtgaagttccacccgtgccaaccatacggttaccaccttgatgttttttatgctgttcacgtaaacgctcttctagcattttcatcagttcttctaaagaacctgctttttgaagttcagctctttgctctggtgttaaatgcttttctagaagttctaagtcgaaccagtcttttggtaatttatgaacttgtttgagtaactcatcaatatcaaaggtttctatgccatcaaagtaatctttcatggcacgatcgaacttatcaaaaaaacgttcatctttaactaaaatggttttagcaagttgatagaactcttcttgatcggcaaaaactagcccttcgcttactgcacgatttaagtcaatcagttcacgagtcgtaactggaacaccatattttcgtaaggtgtaaaataaccgcacaaacatgggttattccctcctttaacgtcgcgacatgaaagccaaacgttcaagcagttgcacatcttgttcgtttttaatgagtgcgccatacaaaggtggaatagcttttgatgtatctcgattacgtagtacatcttcaggcatatcatctgccataagcagactcaaccaatcgatcagttcagatgtagatggtggtttcttcaagttaggaatttcacggagcttgaagaaaacttgaagcgcttcatttaccaaagttgcagagatattcgggaaatgtaccgagataatttcgcgcatcgttgcttcatctgggaactcaatgtaatggaagaaacagcgacgcaagaaagcatctggtaattctttttcattatttgaagtaataattacgattggacgttgagtagctgtaattgtttcgcctgtttcataaacataaaaagacattttatcaagttcatgtaacaggtcatttggaaattcaatgtctgccttatcaatttcatcaattaaaagcacacagcgctcttcactggtgaaagcttcccacaatttaccgggcttaatatagttcttaatatcgtaaacacgatcatcacccagttggctatcacgcaaacgagacacagcatcgtattcatataagccttgctgtgccttagtcgttgacttgatgtgccaagtaatgagttttaaaccaagactttctgccacttgctcggcaagtaaagtcttacctgtacccggctcacctttaaccaataaaggcttttgcaaagcacgagctgcttttacagcaagtttaagactatcagtcgcgatatattgatctgtaccggtaaaatgttgggtatcagcagacatgtagagaccttatttttctatttcaatggttagatggaacgcatgcttttgtttgttatatattttgaccaacaatagccaataaccaaacctagaccgattacaaacagaattaaggataaatttgaccagattaaaggactgtctttagttaaaacaccaaatagtagtccaaaaatagctggcgctacagatgcattaggcccttctgaaacagtcggtgtcaccaaaatagcaaaaacaactaaccagcttattgcgcccaaagtggtaggtaagcggcgcattaaacgccaccagcaccacaaggcaataatagcgccaacgccataagctgttaaagcaataatctcttcaggaattgcatcgagagaagaaagtaattgatttaaaattccagcttgatcttcacgcaccacgtaagccctctggttcaactgcatttgggttaattaacccttctggcggcatctgaataaagaagccttttgtttgtaatgagtctagaacatgtaaaacatttacacgcgctaatttacgtgttggagccaattctaaatgcatgacaaacgttgcacggccaaaggcttgtaaaacagcttctggaactttttcaaacggatcggcttgctccgtttcatcaggatagtttggacgagcaatataaatgtacatttcatcttttttgctcgatctataaatatcacagtgcatttcaaatcaactcttgaactaaggacagcatacatgaaaaaaaacgacagacacacgcgggtttgtttacgcatcagtcgttttttcttttcttgcgaaatattaacccacaacaatcattaaggtcgataaataacttttaattttccaaagttttaaattttcaaccttcattaactctttaattttacataaaaaatctttttgtcgacttttataaaataaaaattttacattttaaaaacaataaaatttgaactaaagcagatagcctttgatttaatctattgaattttataaatttatggttaagtataaagttaaataagctctaaataagattcaacttatgtatacaggataagacattatttaaccgtttttgatttttaatatgattcaataatagaagatcttaaaagaaaatatggaggtctatgctatgtctcgtggcgacaaatcatcttatacagcaaaacaaaaacgtcaggcgaaacatattgttgagagtgaagtagatagaggtcactctcaagaagaagctgaacgtattgcatggtctaccgtcaataaacaagatggcggcggcaagaaaaaatcacattaaaactaccactggatacttctttagttagctctatgactaaagaagtatcttatcaacatgttaacgcaagcattaaaagattcttgagccttgcatataatcattacttacctgatttagagtatttaagattatatggttatcttgagtacgtaaggcttcatttaagcgattcatgtaattcactaacatttctttcgaagcttgagcgaactcggtagttaccgcttcaccttcatataagatgacataactacgggcaaacccataaatgagataaattacagctttttcgtttaggtctgatgagtgtttgagatggtgttcacaggcactttttaaattcttaaatgcatctgtaccagtagattgatttttgaaagatgaaagtattgtttggaagttcatatccatattccactcaaaaagtaaaactacagaagaaggataaacctgtcaaacaatatgttgattattatgaatttagattgtaaaaaattataaaaaacgcccaaaaccatgagcgttttcattgaacaaaagcttagaaactgacttcaatattgactgttgtaccagattgctcaatattggttgagacattaaaacctcgtatttttaactcttcctctacctgtgtgatatgttcaggatgcaaagtatctattggaaattgaaaaactgcccgtcgcttaccttctttcgagatttcctcggttccagataaaattttttctaacaatagtgcttgatctatttttacgtctttcgcattttttcttgcctgttcagcattaaaactattcgtcatatttatatctctaattattagtagttttcatttataacataaaaaaattgatctcaatattagcttattattgattttaaaaactttttacacctccatatataaaattagaggcctcctctccccgagaaggcctctatatttctgcaccgaaacaaacttatagttatatattgtttattttgaaattgtttttcttgctaccaagaatatacagacctgtatatatacacaattgaatttttctcactaataaagttaatttaattcagcatgactttctataattaagattaactcatatttttataatttaaactttattaaatcagcagaatgtaaaatcaaactaaacaaaaagttaatcttataaagactaacttattaaatgattttattttaaagttatattaacgaacaccaactgatcagttattaatcagataagttattttgaatcttaaaattcaatttaactgaaaatttttcttaatacctaaacctaaaataaaagactagctctctcttctttaaataactgaataagcggcttagttaaaagctcatagcgccaacccaataaataatctggaagatcctgttcatcacctttagtaagcacatgctgatgaattgcatttaaccatttcttacgtagtaaaacttctttaggtatagaggtttgttctatcgctttagcaatcaatgcatccattttattcagggtttctttggatgtaattttaaaaggtttagcaattttagctggccagtgcccttcaacaggtaagtcttttaaaagatcaagaataatctttccatattcacgaacaacattcggacgaatatcttttacttgagataattggaaactattgcgtggatttttttcgactaaatcaatcatcgtcgaatttctaaggataaaactacgtggctggtttgttgctctaaccacctcttcacgccactcacttaaattttgcaattgcattaattgacgacgtgaatgacgataattgcccacatctgtatataacaatggggttggtgtttcactaataatttctttggttaaactactacaatcctcaagaacatactcataaagccctttttgtttgagctgatctttaatatggttagccaattgcatgaggtataaaacatcatttgccgcatagcatagctgttgcggagacaaaggacgtgctaaccagtctgatcgagtctgatccttttcaatatcaatctctaaacaaagctttaatgcaccttgataacttacttgtaaaccatgtcccaaaaaggataatccaacttgagtatcaaaaacatttaataggttttgttcatcggcatagtgatagattaaatcaatatcttcaccacatgcatgaaaaatattttgttgagcaagaaagatttttttccaaaactcgcttaaatctaaagacactccatctagcaaatatacatttccgttgacattgacttgacatactccaagtttaggccaaagggtatcaaccttaataaattctgtatcaagcccataagttgaacattgatccatttgttgaagaacatcaaccaattcggtttgctgttggataaactgaaacatgctttctcaagtaaatgcaaagagtgctttaaactctggtatatataacataggattagaaaaatgctactgaatccttgatgaataatctatttttgaacaattttccaaaaaagagataattttttgatcattattttaaatttttcaaatttaatgtccttctaaatatttattttttacaaaagctttttttaatttatatattcactgagtcgtttttaaaaatatgtttttgtcttttaaaaagatttttagataatacgatattattcaaaaaatctttgaaataagcaccgaggtacttatttcatacgcatacggttatgaacagcctgacttaaggtatgactatccacatattcaagctcgccaccttgtggtacgccttgcgcaatacgtgtcatgtgaataggtaaatgcttcgtcgcttcaaccaaataatgcgctgtcgcctgaccttccacagtagcattagttgccaaaatgacttcttcgatcgtaccttggcttaaccgttggattagataaggaatgcctatttcttctggcccgattccatctaatggagaaaggtgtccacccaacacatggtatttgccacgaaaactaccactttgctcgattgccataacatctgccggggactcaactacacaaagcaattgatcatctctttctgttgaagcgcaaatatcacaaatttcgtgctctgttaaagagtggcaaacactacattcatgaatataacttgatgcttcatgtagagcatgtgctaaagcaaatgcaccttcacgatttttcatcaaaagatgtaaagccatacgttgggccgacttcggtccaacgctaggcaaaatacgtaaagcttgaacgagttgttcaaatctatcactaaacactgattttccttagaacatgcctgctaaaccaggaggtaaacccataccagagttagctttttgcattttttcttcagaaactacttcagcttgacgcacagcatcattcaccgcagctgcgattaagtcttcaatcatgtctggttcgtcttgaagtaattctggattaatttcgatacgttttacgatataacggccagtcattgttactttaactaaaccaccacccgcttcagcgtgtacttcagtttgagcaagctcttctttagccttttttatatttgattccatatctttttgcatgcgctgcgcttgctgcatgagcatattgatattcataaacctaactccgtatctctatcaaatatttcaagtattattgatagtcatataacacttcggaacttaaactctttgaacgcccctatcgatcagtaagatcattgaggtcagtacgtttaaatcaaaattaatccgcaattctgacacaataaattaatgttttctattggtatctatgaaactcttttaggtaactcatccatttaaagctttctatacgaaactttttactgcgaaggccagttctaaaatttaagttaagctactgcgaggcttggagggtgctattgtcgggtttatattcatttaaaggaattttctgaaaagaggcattcgctttttctattgtatgatcagcttcttcaactgatttatttgcatcattaatcaatagaacagtttcgttaatttgagtcggttcatccttttgggcaaatactttgtatccaaccaaaccaattgcccctatagcaactaaaataattataggtttaagcatggttaaaaactcactttgttatttttattaaatttagaacttttatacgttgtgatttttaattcatttacaacaaaatgtagcttttttatttcaatcgttgtttatgagtaacttatcttaaagtaaagccacactaaaatgagtgtggcttaattcttagatatataaattttattagatcaaatctaatccacgtgagatatcaccaataatatcgttaatatcttctaagccaaccgaaacgcggattaagccttcttgaataccagcagcttcttttgcttcaacagaaagtttgccatgagttgtggttgctggatgggtaatcgtcgatttcacatcacctagattaccagtaatcgagataaacttagtattatcaataaccttccacgcgccttcacgctcacctttaactacaaaagaaacaatcccgccaaagccattttgctgttttgctgcaagttcatgaccttcatgagttggaagcccgccataatagaccttttctactttttcatgggtagacaaccactcggcaagtttttgagcattttcacagtgcgctttcatacgtaaacgtaaagtttctaatccttttaagaaaatccatgcattaaacggactcatagatggccctaaagtacgcactacgctaaaaacttcttctaggagttgatggttacctaccactgcaccacctaacgcacggccttggccatctaaatatttagtcgcagagtaaatcacgagatctgcacccaactttaacggttgctgtaaaacaggtgtacagaaactattgtcaacagcaagtaatgcgccatttgcatgcgcaatatctgcaagtgcttggatatctgcgatttcagctaatggattagatggtgactcaacaaataatagtttagtttctggacgtactgcatttttccatgcatttaaatcgcttagatccacaaatgtgatatctacaccaaacttggcaatgtacttttcaaataaagcaacaatagaaccaaaaactgctcttgagcaaataacatgatcacctgcttttagatacgccatcgcaattgatagaattgctcccatacctgagcttgtagccacggcacgttcagccccatctaaagctgctaaacgtttttcgaacatcgatacagtcggattagtaaaacgagaatagatatttccttgaacctgaccagaaaattttgcagctgcttcagcagcgttttcatatacaaaagatgaagtcaaaaaaattggttcaccatgctcaccttcaaaactacgagtgtgtccggtacgaatggctaaagtatcaagttggtattctaaatcatcagactggttcattaaatgttcgcctttactggtcatgtactaaaaactatcatcattttgagtgcctaaggtatttaaggtcaaggtaaacctgaaaattatcgcttagacttcaatcaatctttagtatagttggtaaaacaagatgaaacgcttaaagtcccttgtctcagaacaaagtcaaatcaagcacctctctacccgactatttcgtcctcaaacattagtattgtcacaaagcactccatttgaagtgattggtgaattcaaccaaacccgtgttcgttattatgcagctacagaaaagagctttagagaaccattagtatttgtggcacctttagctattaatatggcgatttatgatttatatccatatcgttctcttatcaaatacttccaaaatgcaggttttgacgtataccttgtcgattgggggcgtttaggctttaaagatagacatcttaactttttatcgtttattgaagattttattcctaaagctatagagcttgtacgcacacattcaggcagtgatcaagtttctctacacggatggagtatggctggcatattcgttactttatatacagcgcataatcatccgaattatgtcaaaaaccttatagttttaggtagcccaatcgatagctatgcttctggttatattggaaaactctaccgaaccataaacaacactattgcccgcaataaaaagcttcaggaacgtatctactcaggtttaccgaagcgtttaattcataccccgggcattttaaattccttaggctttaaaattcttgaccctaaaggctggttcgatggtcatattcaattacttaagaaccttaataatcttcagttcgtacaagaacatgccacattaagcagttttttaaacaatatgattgattatccgggaggtattaatcaggacatgttatttaatgtttggctgcaaaatccattaatacaaggttctattcagttaaaagataaaaaaatcgaattgaaaaatatcgactgttcactcttagttggagctggtcgtagtgatcaattagtgacggcagatgcagctcagccattaagtcagttaaccagtagccaagatgttacatttactcttattcctggcggtcatttaggtctaatgtcaagccaagcaagtgcgcaggaattctggccaaagctagcaacatggctgagtgagcgttcaacaaaaatctaaatttaggcataaaaaagccctctatatgagggcttttatctaacgctttctctatgaaaacaaacctaagctaaaactcattagaaggatagttttttaaatacaaagtatccgaccttactttcaaaacttccgtctttttgaatattaaaatactttttaacaacatctgctgcattttcttggagatacttaagcgtttttatttgatcttcaggtgtcttcatgcgctgtacccaactatcaaaatctagtttgagggtttgtttctctaaagttgttaattcaaacccagcatcttcaataaagtgaacccagtctttaatactgtaatttcttacatgactagggtctcgaatcacttctatagtctgtaaaaatgtatctaaaatagggaaacttgagctaataatatcaacaaaaataacagtgccatttggctttaatacacgatttatttctttcattgctgttggtacatgctgccaatgatgggcagaatatcgactaataattacatcaaactgttcatcagtaaaaggcatatcttcagcaataccttgctgtacaaaaatattttttatttttcgagcattggcagcttttgaaactgtatcgagcatttcatgagataaatcgtaagcaaaaaccagatctgcatggcgagcaacgttataagctacatgaccaccaccgcaacctaaatctaaaacaacggcatttggatattcatcaatttctttaatgaatttatcaaactcgaccccttcagagtgagcggtgctattcaaataacttaaagatttattttgatactgttttaaatttatctcatgttgattcaacatggcttattcctcttctttgatgagttaaccataaaagaaaaagtagataaaaaataatgattagtttttcaataattaataaaataaagttatagtttgtatctctatcaattcttaataaaaaaaccaccatatggtggtttttttatgtaaggccaagttcatatttaaaaattactttgcagtaaatttaatattgaactttcttacttgttttctaacttccggattaaaaggtaaaacaaagggacttgcacgccatatcgccttttcaatactcgacttaaacttttggtcttctttatctagaaaaataatttgctcaatctcaccagtatcacttaaaaagactttaacgctagcactcattcccactgaagaaggcggaacattccaaattttaaagatctttttttgatattgttgcttgtacttttctgcttctacaataattttctcatcatcactttttgctggtgataataacttagaattaattgtgcacccacttaataacaatatagaagttaaaataatgacgtttttcatttataaaaccaattttttcaacgattaaaatttaacattttatctttttaaaaaccacctaaatggtggttttatgctaaatagctactattaaatatgttcttagcaaattctagattttagctaatttacgaggattatttagtttaactatttaattataattttcagcatcgttttaaaaagatattttataacgtgaatttatacttgagcgttcaggcatatcagcaatatcctgctcagtaaaaattccatgttcaagtactttagtgccattaaaggcagtattgaccggagtaacaggcgatttagtaatataattttcatctgctttttgtgttaacgatgcacacccatctaaaccaaatcctgtagccaatacaagtaacaatctcttcatctgtcttacctgttattataaaaatcagacaatctaacaaattatcgactgattgtcacatttttaaaacgattaggactagccaattctttacaaaaactcaatgaaatgtaaagtaatttgcataaagtgttaaattgtgtaaaatacctaaataatttaatgatatgttttaacttatgatctttttacttttcttatttttgttatttacctttgtactcctcttaaatgcacattacaaacactaggtatttgtatctgttcttctcatctgctaaatattttttgaaaaattaattattttcttaaaagcgttcacttactttctttagtctagatttttataaatacaaaaaaagcccgctttgtaagcaggctttaccctttttgattttttgcgctgatcattcaggacttttgctgtttgtgacagcgctcggatattacacttatacttaaagattaaaaagactaatcttttttaaactgatgcatttactcatcaatttcaatcggatcgccgtcttcaggacgaatatgtcgtgtcccatcatcagcaggatcgacactagagccatctttagtaatcgagttatacatttcgtcctcttttttatcgtctatgaattcttcatcttcaaaatcaagaggctcgtcatcatcttcaaaatttaaaggcttttcttcatctatcatgtgaaccatccttttttaagctatgtgatttcatgctcaaataaatatcggatatattcaacagtgaacacacattatttatgtaaagaatacttaaaaattattaaaatatataaaaagttaaatagggttattcaaaatattttaagaactcttctaactcaggtaaatgtgcaaagtttttatgagcatcccctaacacaacccaatcatgttttgactctatacaaaaattaagttttaaatctggtttaaacggttgttcaagaagccccaacggtatccacatatagtttgtaccattaattttattagggacaggcgagccacatctattacaaaatgatgaagtaaaaccagtttcttttttataggtagccacatattccttacccatcaaccaattaaactgattttcttttactaaagtagcggcattcgctccagtcccagtttgttttcggcataagctgcaatggcagtgataaaccgttttgatttcacaaagtacagagaattttactttatggcataaacaagaaccgatgttactcatataacgtacttatttcattactataaaaattttaatcatgactttaaatattggttaagtatatattttaattgtttaatataaaatatatctaatcttttgatttaaaaaagattataaaaaagatcttgatatataaagcttttttatattataaggtgaaatgtgactttaaataacacttgagtaattaatagtcattgaaatattgggaataaaccttatattgagtacaggttcatacctttaactgaggaaaagctcatgaataaattaatggttgcggtattcgctggaatggtgacccttgccggtttcagtgctcaagctgcaacacctgagcaagaatgtcaaaaattgcaagatgattacaatttgatttatgcatcaaaaggcttttgttttaaagaccaagatgctaaagaaaaatatggtaatgaaaactgtcatacgactaagccaaaattctctgataaagagcagcaacgtctagacgcaattaaagaacgtcaaaaagaattgaagtgtaaatagtatttaaaggaataatacatggcatatgatgatcaaaatatcttcgcaaaaattttacgtggtgaacttccagcgataaaactctatgaagatgatcaagttctagcttttatggatattatgccccaagccgatggtcatgcattagttattccaaaaactcctgcagtaactttacttgatttacctcctgaagcggcagcttataccatccagatcgtgcaaaaaattgctaaggcaatggaaactgcattaaatttggatggaattgtgctcatgcagttatcaggagcagctgccggacaaactgtccctcatgttcattttcacctaattcctacaaatgttcaccaacttggcaaacatgcggcgcaattaggagaccaagataaaatcaaagctttggctgagaaaattaaagcagcactttgattttaagagataaaagcggagtttaaactccgctttttttatttaaaaagtgtaataaaatcaaaagaaaataaagtatttccaatttttaattgtcataaaactgtcatttcttcttcactccattgtcacaaagtttacagatacttcttagcaagttggtgagcttctgtaactttttgtacataagccaactaaaaaataaaagttagctaggcatacgccatttaaaaataccttttggagaaatctcaatgaagaaattgcttctcgctgccgcagttgcaactttgagcgtaaacgcggtgcaagcagcgccaactttgtacggcaaactaaacgtttccattaaccaagttgacaacaaaaatttcgatggtaaaagtgacgttaccgaagttaactcaaactcttctcgtattggggtaaaaggtgaagagaagttgactgataagctatctgctgtttatttagctgaatgggcaatttctactgatggttctggttcagatactgaccttagcgcccgtaaccgttttatcggtttaaaaactgaaggcgtcggtacgttaaaagtaggtaaatatgattcttacttcaaaacctctgctggtagtaaccaagacatctttaacgatgacacacgtttagatattacaaatattatgtacggtgaaaaccgcttagataacgtggttggttttgaattagaccctaaattattagctggtttaacattcaatatcatggctcaaactggtgaaagcacttctgatagcaaaaaaggcgaaactggtaaagacagcaaaaatgatagcttcgattcagtttcgacttctctaggttatgaaaataaagacttaggtttagcaatcgctgctgctggtgacttcggtatcaaaggtaaatatgctgcttacggtttgaaagatgtttatacagacgcttaccgtgtaactggttcttatgacattgctaaatctggttttgtagtaggtgctttatggcaacatgctgaacctactgatgacttgactgcatatggtcaaacatataaatcagatggttcaatcgataaagctggtaaagcttaccgtggtttagaagaagaagcatacgcggtaactgctgcttataaaattcctaacactaaacttaaagtaaaagcagaatatgcttctgctgaaacacaagtaagtggtcaggcagatcgtaaaattgacttgtatggtttaggtcttgattatcaaatcaataaacaagctcgcttctacggtatcgttgctcaacaaaaacgtgactggttgaatgacgacgacaaacaaactgttgtaggtactggtattgaatataacttctaatcagttatgttcgattcatatctaaaataaaagggcttatgcccttttattgtgctatcaaaaaagccgatatttttatatcggcttttaaaaaatttatatcttattttaagaaaccacttacaagattcatcacattttgaatatcttggttagcttcttgatgatctgtactctcaccttgaggtgttaaagaatcaatgacttgaggtaagacagaagcgattgcaccataaacttgttcttttggtgcttgagcttgctgagcaacttgttcaatgtctgctggattaaacagactttgtaattgctgggtcggaacttcactattactttggtttggatcaacccaactttgaacttggctacctaagccagcgccttttaatttctcaagagcagcttgtaaaccaccttgttgctgaacccaacctaagattaaaggtaccactgcaattaataaactttgtacaccaccaccagtttgaggtgtgttgttattaccagtgacttgtcctaatacagaacccaatactccaccaagaccaccttgggcaccagatgaagtattaccacccatttgtcctagtacagaacctaaaattccacctaaaccaccttgacctgacgcttgctgattcccacctaaagcttgcttagccaaaacttctacaatgttgcttaaatttgtcatgagtaactcttatgtatggtttatacatgagcatacgcgtttttttgttaagacagcaaaaatcaaattgttaaattttgaaagagatcgcaaggtcttttaccaacggaatttattccaattttctggatttgcccaaaattttgaattaaaccagtctgggacatgcttataggtcaaaatattaaattgccataaagcaaaatcactatcatgtgaagtcttatcaataagttgtgtaaaacctaaagaacgcagaagctgttcatcactgcgcttgcttactacaacaattcgttttgctaataaatctcttagctttactaataattgtgatttttgcacatcgctgatgtcctgcatttcatcagtatcaaacaatacaaaacccaaatcataacgctgagtaaaaggcagacttaacagctcagttacggtaaaatagtgccattgaattgcgttattctggtcaattttctggccaatacaaagtgcagtatgaataggctgttcgtttgataaatcgtctagcatagaagtgatgacattttgttcagccataactgcaacccttaattgaaagatgtgagtttaaactttatggaactacaaggcatttgccataaaatgcatgcaggcctaaaagatgctagtgtaactgatcaacagacaaccaaggcaaatgttgaatacaaatttgtattagaccgttcagaaattgatcttccttttaatttaggacaagaactagaaatcgaatggacaggtaatatttattgcacttcttgtggtgctaaaacaccaaagtcttattcgcaaggccactgctttaaatgctttaaaacgaaagcggaatgtgacctttgcattatgaaacctgaaacatgccactaccatttgggtacatgtcgtgaagatgattttgcccacagcgtatgtttccagcctcatattgtgtatttggcaaattcaagtgctttaaaagtaggtattactcgtgttagccatatgcctggtcgttggttagatcaaggggcaactcaagccttacctattttaaaagttggttcacgtcgtttatccggccagcttgaaaccatgtttggttccttaattgcggataagacagattggcgtaaacttctcaaaggcgaagctgaacctctaaatttgattgaacaacgtgatcagttaattgaagagttcgcccctaaaattcaaactattcgtgaagaatttagtcaaaaccttgaatttaacgaaacggttgaattactagaaaatgaattgccacgtgagtttgtttatccagttgaacaatatcctgaaaaaattaagtctttaaacttagataaaacaccaaaaattcgtggtgtattgcaaggtattaaaggccaatatttaatttttgatattggtgttattaatatccgtaaatatacaggttacgagctgattgtacgtgcataagtcgatttaaaaaagcctcataaaaatggggctttttaatcaatataactaagataatctatttctgaataaccaagctgctaaaggtaaagttactattcccagcacaatcattggtaaaaagttcaatttgacttgtgcaaagcttgcaccttccaaataaacccgctgtaccaagttaattccaaatcttaatggatttgcataagttgctacttgtaatgcttttggcatgttttctacaggtgtcagtaagcctgaaagtaacatcaaaggcataatcaataaaaatgtaaaaagcatggcttgttgcatatttaatgataaagctgaaattgataagcccacaccaactacagccacgttaaagctgaataatccaaaataaaccagtccaatagagccattcattggaattttaaaccagaacaaaataatcaataaaataatggtcgattgcatcaaacctacaaaaatcggcggcaaagccttaccaatcataatttgtaatggcgtatagggtgtcactaataattgatcaaacgtaccctgctcacgttcacgcgcaactgataaagcagataaaagtaatgtctgcatcatacttaatgctgcaattaatgcaggcattaagctccaacgagactcctgatttgggttgtaccatgttcttgtttcaaggctaatcggtaaagctgaattaaacttttgctgattgaactgaccaataattttacttagatatgaccctgcgaccatagctgtagatgaatttctaccatcaacaatgatctgtataggagagctttggttattgtttaatttactctcgaaatcattggggatcgtaattacgagcaatgcctgacgattatcaataacctgtttgatttgttcggtatattccagtgtggcagcacgcttaaaaataccagagccatcgagcttcgagatcagctcatgtgaaacctgcccgttgctctgatctaaaattgcataatctacatggttaacgtcataagtagccgcatagccaaataaaagtgcttgcatcagggcgggtacaaatagaatagccctatttgcaggatcactaaaaatggttaagaattcttttttgactaaaaaacttaattgtttcagccacgtgattaattgctgccacataactttatctcaaccgttttttcagtgaaaagttcacagcacatatcaaaacaacgatatatcccaataaaataccgcactctttaaaccatagcttccaatcatcacctcccataaataaagttttaattaaaaccataaaatgcgtcgctggaagtaactggctaataatttgcacaaccaaaggcaaattgcgtgtatcaaaaacaaatccggaaagcatcagcgctggcataaaacttgccaacaaagcaatttgactcgcctgaaactgactttgggcaaagccagatatagttaaaccaagtaataatgaaacgattaaatatagaaatgaagcaaataaaattgagaataatgaactgcgcatagggacttcaaaaataaaatgtgcagcaacaatacaaataacgatatcaatcatgccgacaacaacgtacggaatgagttttgccaacacaatttcaaatggccgtactggtgtgacaaataaggcttctaatgttccccgttccctttcacgggcaataaccagaccagttaaaaatgcgccaattaaagttaaaatgagtaccattaaacccggcactaaaaaccaagtactgttaccagattcgttaaaccatattctttgttcaattttaacggcgcttgcagatgctaatattgggctacgatcaatttgtattgatggcgcggtagccaaagcacccgcgacatacccctctaaagcagttgctatggtggtcgatctaccatttaatagcaattgaacctttgcgttaccttgttgggtctgacttgcaaaatcggaaggcaaatgcaaaatcgcatcaattttgccatttcgaatggcctgttctgcttcaggcaaattatgaaattctaaactggttaaatatcgcgatccatttaagccagctaagacctgattgacctgcggcgaggactgatcaactacaacaccaactcgtgcttggttcaagtcaaaagaaagcccataaccaaaaagtaaaattaagataacaggcaaaactaggccaattccgagactgcttttgtcacgaagaagctgtttagtttctttccgaactaaggctttcaagcgactccaaaatgcaaagctcattgtaggtctcctaacccgcatgccttaatgcacgtgcttgttccacaattgcaataaaagcctcattcatatcaacaatatgtttatctttacttgccaattcgcggacctgttgaggagaacctagggctagtaactttcctgcatctagtatggcaatgcggtcacaatattctgcttcctccataaaatgggtggtaataatgatggtaatgccttgatttgcgagtttaccaatgctgtaccaaaataaacgccgtgcaagcgggtctattccactcgtaggttcgtctaaaaataaaatttctggttcatgtaataatgcagccgccatagataagcgctgtttataaccaccaggtaaatcaccgcttttaatttgcggctttaaatcatattgttgtaaagctttatcaatttgttgatttagttttttgcccgataaaccataggctccaccaaaaaacttcaaattttctaaaacagttaaattgctatacagtgcaaatttttgagagacgtagcctactttagctcttgcttcagcacgggccgtccgtaagtttttacctgcaacttctaggtaaccgctacttgccggtagtaacccacataacatgcggaatgtcgtggttttaccagctccatttggcccaagtaacccaaagatctctccacgctgtacagtaaatgacgtattggcaacagcagtaaaatctccaaaagttctgactaaatctttaactacaataaccgcttggtctgattgcgaattattgttttgttcggatcgaaaagcctgctgagaaatagagatttgttgtttttgattttgctgtaacaacatcataaaagcatcttcgagttcaggtggtcgcctatttgccactagccccagaggtaaaatatttgttgatagttctttttggcggctaataaagtttacttgctctccccttggcactgcatcaataatctctccagaatttccaagcaactgggcttgtacaatccgagtcttaatctgctctgaaggttttatttgccatgtttgctcatgtactaacgcttttaattgctcaggtgaaccttgtcttaaaattttgccttcatgcatgatatatacgtaagcgcacttttctgcttcatccatataagcggtacttataattacgcttaaattttcttcctgaacaagttgttcgataatgatccataaatcccgtcttgataaaggatctactccaacactaggctcatcaagcaagagtaactctggggaacgaactagagtacatgccaatcctagtttttgcttcattccaccagaaagttgccctgctagacgttgagtaaactgagtaagatccgttatttccaataaacgtttaaatctttggttacgtacattttttggaacgccgtgtaagtcggcatataaatttagattctcttgtacacttaagtcttcatagagtccaaaacgttgtggcatataactaatacggtcttggacaacttgaggatgtttttcaatatcaaacccgagcacatgaagagaacctgaactcgctttatataatcctgcaattaaccttaataaagttgttttacccgcaccatctgggccgactaaagcggcaagttctccttttttgatttgcatattcaaatcaacaattgcactaatatctgctgaatttttattttcggctttaaaagtcatgaataaattatgggcttgaaccactgctttactatcaatcataggctttctcacttaaagcaagtgggacatttactgtcacaggttgacccatttttaattgatcattcggatcatgtacatacacccgaacttcgtaaacaagtgttgttctaatctcttctgtctgtactgttttaggtgtgaactcagccactgaagatatatagccaatttttccattcataggctgattcggataagcatcacgaatgacttgagccgtgtctcccattttaattgaacttaaatcttgttcatttacataaacacgaatccattttggattggtcaaggctaatgtataaacggccttttgagcagttgtcatgtcgccaacttcttgcaaccgagctcgtaccactgcatttacaggagaccttagttctgcttgagtaaggttatagttaattaaatctaaattagccttagtcacttcatactgtgctctggttgcttcacgatcttcttttcgtgcacctttaattaataattctaaattggcttgtctttcacggaccgctgcctcagcactatgttgattacttttggcatagtcgagttcttgttggctaattgctcgaccatcggtactacttaccaaaatttgtaagcgttgcaagtttttattggttttatcaagctcagcttgggcagacgcaagttgagcttttgcttgggtgatttcttcagggcgagctccaacctcttgtttaacaattgcctcttgttgagctttaagttgtgcttgagcttgctttgcctgaatttgtaatgcattggtattaagggtcgccagtacttgacctgcttgaactttatcgccctcttgaactaaaagtttctgaatacggccagactgttcaaatgcaagtgaaacttggcggatatccacatttccatataaagttaatacattattatctaattgttttttatgattatatccccatacccaaaagccgatggcaactacagctataacaactaaaatgccggcaatcacttttttattcatctttttggccttcttattaaattcaaatttacatagtttaaattcaatttaaatttaaattaccttaatctttgaataaaagatatacttttatgatgaaataaaattaggtttaaacatgtccagatctagacgaagtgatggtgacttaacaaagactaaaattattgaggcagcaggacccttaatcgcccaatatggttttgcaaaaacagcaaacaaaacaattgccaaagtagcaaatgtcgatttagcagcaattaattatcactttgatggtcgagatggactatatcaagcagtgttaatggaagctcatgcccattatctagatgaacaatacttactagaacttgttgaaagtacttaccctcccgaagaaaaattgagtttattacttgaaactttattacataagttgacggaaaaagatgtttggcatggcaaagtttttattcgcgaactgttttcaccttctgagcatttattaaattttattgaattaactggtatgagaaaattttttcttattcgaaagttgattagtcaagtggcgaacttagatgaaaatgatccggccgttttaccttgtattttaagcgtgatgaccccttgcatgatgcttattattgccgggcctaatgctcaagcacctgagccacttaaaaatattgctcagatgccattacatgatttagttgaacattttaaaaaattttcattagctggattaaaagcaattagccaatcaaatcttaaaaattagctattcaaacattgcaaaatggcttgaaccggatcttctgtatttccagaaataagctgtttatgcatagttaaatgttgcattacttgaatttgagcggtttctacattcattagtttttctatttcagccgctaaattttcaggtgttgcatctgcctgaatcagctcttcaattacttttttacccgcgatgatatttggcaaagagtaataaggtattttcaccaagaatttagcaattaaataagttagccaatgcagtttatagaaagtgaccattggtctatgcatgagcattgcttctaatgtcgccgttccagacgctaaagcaataatgtcactcgcgttcatgaccatacgaccaattttcgattcactatccgtattttctaaaatatgaatttttgcttttaactgcggtgctaattgttcaaccccctgctcaatctgctgtttgcgcgcatcattaattgccggaattaaaaactgaatatctggatattttgtatgcaaaatattggctgcccccaatagcataggaagaagcctttctacttcacccttgcggctaccgggcaacaaagcaatatgtttttgattttcatcaacacccaattcttgtttagcaatttgaatagggttctcaagcggtaattgtttagctaatggatggcctacaaatgccgctggaacttcatattgttcataaaaaactttttcaaaaggaaataagcaaagtactaaatctatactttgtttgatgccatgtactcgcccttggcgccatgcccaaactgatggactcacatattgaactgtttttattggaagattcttttctttgatacttttcgaaagtctgaggttaaagtctggtgcatcaataccaataaaaatatcaactggatgctgagtccattgattaattaagccatcacgtacggcgaatagtttttttaagtcttttaatacttcaacaatgcccatcacagacagagtttccattgggtaataactgttaaaaccttccgcaatcatttgagggccaccgattccctcaaattcagcatcgattccctgctcgcgaaaactacgcatgagttttacgccgagcgtatctccagaaacttctccaactacaatgcctattttaagttttcggtttgccaaggcgatttacccaagaatttgaaataacgcattctagcatagagacttattaatcttgaacttgcctaatcaatcccagctaaacctagccctagcacatcactatctaaaattacattcatacactatcttttaatctaaattaacaatgttatttgaattgtagcttacatttacaaacaataaaataaatgagaattatttacattatctttaatcttatgaatatcccacctcgaccatttaagttgtctgtaatcgcctgcgcgatttgttatgccaacctcacctatgcccaagatacacaggtacaagctttgcaaacgattcaagtcaaagcatcaaatgcagagcagtcttctgaacagaccaaggcatataatgttaaaaactcgagtagtgcaaccaagcttaatattgaggctaaggaaacaccccaaaccattaatgtcgttactcgtcagcaaattgaagattttggccttaccagtactcgtgatgttttaagaaatacccctggtgtaacagtctctaatcaagaaactgagcgaactacttatatggctcgtggttttgagatttcaaatatcttaacggatggcgtaggcttccctctttcaggttataactataataatacgaatcctgatacttacttttatgatcgtgtagaagtagttaaaggagctgactcgttaactaatgcctttggcgatccgagtgcaaccatcaataatattcgaaaacgtccaacccaagaatttcaagcaagcggtggtgtaagttacggttcatgggatacgcagcgctatgaagctgacgtatctggctcaattctaccaagtggaaaagtacgtggccgtattatgggctatgaacaaactggtgattcttacctagaccgatattctgcggaaaaaaacggctttgctggtattgttgaagccgatttaacagatagcactttacttaccgcaggttatagccaagaacaaaataaacctaatgcaaataactggggtgcactacctttattagatgccaacggtaaacaaatttcatatgatcgctcatataaccctaaccctgactgggcgcactgggataatgagacacaaaatgcttttgttgaattaaaacaaaaaattaatgatcaatggaatgctaagctgacttacaactatcttgatacgaagcataatagccgtcttctctattactatggttacccaaaagctgatgggtccggtgtttctctaacgccttggggtggacaagaacatcaagaaaaacatgctgtagattttaatctcgaagggacctataagctatttaaccgagaacatgaagcaactctaggctacagctatgtacgtaatcatcaacaagataaacaatctacaggaacgattaacgatagtaatgttataaagtcaactactaccgattgggcaagttggacaccgcaatctataacttggtcagatttcacagaagcggctaactataaacaaaatattaactcaatttatgccgcgacacgtttacatcttaatgaagatttaaaacttttacttggtgcaaactatgttcaagctgagagtaaaggcgaaagttatagctcaccaatgtcatatagtgaaagtaaagtttctccatatgtcggattaacctataattttacacctgaatatacgggttacatgagttatacctctattttccgtccacaaactggtattgataaagataccaatcaagctttaaaacctattgagggtaaaagctatgaaatgggtgtaaaaagctcatggctagatgaccgtttaacaggcacactttcagtatttaaaactgaacaaaacaattaccctttacgtaactcggatggaaacccacttaaccggaaagtaccaacgagtgatctggaatcgcaaggtgtagaggtcggtctatcaggtcaaattactgataacgtaaatctttctttcggctatgctcaatttagtattaaagatactaaaaatggtggcgaagcaagaacatacaatccaaaccagacacttaacttgctaactacctatactccgccagttttacctaagcttaaagttggtgcaggtttacagtggcaagatgggataaagttatatgactcaaatgtaaacggtacgatcaaacaagatgcatatgctttagtcaatttaatggcaagctatgaagtcaatgatcatattacgcttcaagcaaatggtaataatatttttgacaagaaatatttaaatagtttcccagatgggcaggctttttatggtgccccagccaactatacagttgctgtaaagtttaaatattaatagcgtagccaatcccaatttggggttggctttcttttttatttttttatgtgtcagtaaatatgtccagaactttaaatcttcccatgttatatcgcataaaagttttctatcgattcttagttgttttcggtatgggttatgcctgtatggtgtacttaagtcttggactaactgaaattttccatttgaatttagacaaaccagaagctatctatttggcggcctttatttctattttgttttatgtatttttcgtgattgttggtttctgcatccaatcattattgcgactgaccattttatcaatcgcattatttgcccttttctttattgtgacacggacggtaggttatgcataaaggtatacgtcaatctatggcatggctccactcgtggactggtttaatttttggatggctcgtatttgctatttttttaatgggaagtttgtcttattaccgccatgaaattaatttgtggatgcaaccaccccttgcacaatttgaaataaaacaagatgtggcaattaaaacggcatatcaatacttacaagaacacgcttcagatgctaaatcttggtatttaactgttgctacacctgaaagtccggtaaatacgatgtattgggaaaaaccagatggtagttatggaaatgcaaccctcgatgcaaacactggtcaagaattaaaactttctgcgactgaaggcggtgactttttctaccgtttccattatcaactttttggtgtcccgatattaattgggcggttggtcgtatctttagcagcttttattatgttgattgccttaatctcaggcattattactcataaaaaaatcttcaccgatttttttaccttgcgtacctttaaatcgcagcgctcatggttagattttcataatgtttcatctgttattgcactgcccttctttttaacagttacttttactggcttggctattttcttctatctatatttgccttggggaatgcaaaaactctatccagagaatccatatcaatatttcaatgatatacgtacaaaaacagtcacagaaagtacaacaccgcatcctgcacagaatttaccagttgaaaagctattagcccaacttaaacagcgttggggaaatcaaactttagcaactatgagtgttaaaaacccaaatacgaatcaggctcaaattacgttcattcagcaagaagaccattctattacccgcaatcaagcacaaatcacattagatgctacaaatgctaaagtcttgggtgatacacgtaatcatagtcctattgccacactttatgctggagtatatggcctacatatggcaacttttgctcagcctctacttcgcttaggattgtttttctctggcattttaggctgtgtaatgattgcctctggcttgttgctttggagtcttaaacgccaacttcaaagtaaaaatagtcagtttcatttagggcactatttagttgaccgtttaaatgttgctacctttgtaggtttgccttgtgcaactcttgcttatttgtatgcgaatcgattgtttactgtcacggccaccactgttaattatgaaatttatagtttcttcttcgtgtggctcatgagctttattattgcgctcatcactaaaaaacaatatttatggcaaactcagctaggtatttttattctgcttagtattgcactccctatcttgaatataagttatttactgaaaaataattatattcaaaactttagtggttattgggattttgtacgtatagatatatttttctggttatttgcagctttagccttttttatatttcttaaaattaagcctattcaatataaagcttcagataaaattcaaaaaaagctgagtaagttaaatattgaggtgaattcatgatgttctttgtgtttatcctgactttactaggcatgtatttactattcatatcgactgaaaaatatcgctcaccgaaatcaactggtcatttcaaatctttagctcaaaaatattattcattgttgaggatattggcctttttattatttgcgttgagcgggtttattctcatcaaaaaatatggtttttcaattggttttgtcagctggtggatctttgcaacacccttaacctttttgctgatactttggcttaatccgctcaagccatcaaaaacttcctctaagtcatcaatttgaataaaatttcctcaagctaagcatgattttgattgcttagcttttttttgcataagtaaatcattattcatgacaactgtttatctctaaaaggaataagatatctgcgtttcgtgataagtggcgataaagatgtctggtgcttttgaatttatcttggcaggtatgttagttggcttctgtgtaggtattacaggagttggtggtggatcattaatgacaccaattttaattggtctttttaggattgaaccgcatatcgcaattggtactgatttactttacgccgcgatctctaagttctgtggatcgatggttcacgcaaaaaaacttaatatcgtctggccgattgttttatggctagcggtcggtagtattcctgcatcttttggtactgcgtgggtacttgagcattatttaagtcagtcaactcattataaagctgtattaaccatggtattaggctttatgttgaccttaactggtgtttctatcattttccgtactcggattgaaaagttctttaataaattccgaaataaagagaatactcaaactgaaaatgagcaattagctgttcaaaataaacgcacctatattgtgattatggggattattttgggcgtattcgtaacactatcatcagtcggcgctggtgcctttggaattatggcacttgtaatcatgttccctaacttaccaatgattcgtattattggttccgatgtcgtacatgcagtattactaaccttagttgctggtctgggacatatgagtgccggtaacgtcgactttatgctacttatgtggttgttggtaggttctattccggcaattattattggaacattaattagctcacgtatgccagaacgtttaatccgtaaaattttgggtattacactatttgctcttggtgttaactttatggtccacccagtcaaagccaaaccaaaaacagctgtggtacaacaagcagtagttgctgaaaaaacaggcaactcgaccgaaagatagtaaaatcaatgggatttttccaaactgaattgccatgagatgtagtattttcataattatttcatggtatattcagtacacaaaacaacctttagtatgatcgaaccagtgacagcaatgactacacattcaaattccgtttctaagccagatatcgacgacgttaatattaaaagcattcaaactcttgtaacaccaaatgagcttaagtcagaacttccgttatctgatgttgcttcgcaaactgttctaaaaggccgcgaaactattcgtaatattttagatggttcagataaacgtttatttgtcgttattggtccttgctctattcatgatccaaaagctgctcacgaatatgctgatcgcctaaaagcgctaagcgaaaaggttaaagatactttatatctagttatgcgtgtttattttgaaaaaccacgtaccacaattggctggaaaggcttaattaatgatccggatatgaatgactcatttaacatcgaaaaaggtttacgtattggtcgtaaacttttgcttgagttaaatgaaaaaggtttaccttgtgcaactgaagcacttgaccctaactctccacagtactatcaagacttaatttcttggtctgcgattggtgcacgtacaaccgaaagccaaactcaccgcgaaatgtcttctggtctatcatcaccagtaggttttaaaaatggtacagacggcggtttaactgttgcaaccaatgccatgcagtctgttaaatatggccatagtttcttaggcttaaatgaagacggtcaggtttcaatcattaatacaaaaggtaacccttatgcacacgtggtattacgtggcggtaatggtaaaccaaactacgatgctggctctgttgcagaagcagaaaacgctttagcgaaagcaaaagtgagcaacaaaattatgattgatgcaagccacgctaactcgaataaagacccttacttacagccgcttgttcttaaaaacattactgaacagattttagacggcaataagtcaattgtaggtattatggtcgaaagtcatctaaaaggcggccgtcaagatattcctgacaatctttgtgaccttgaatatggcaaatcagtaacggatggttgtattgactgggaaactactgaaaagacattgcttgaaatgcatgaagctttaaaagaagttttaccaaaccgctaattcatctttttgagattgaaaattaagccctcattttttgagggcttttttattttattgaggtggaatttaacatcaaactaaataaaaataacttacgacaaaagtaaaaatcagtacagtttcacctatttcaatcgctgcaccgacggtatcccctgtaataccgccaatcctttttataaacacatgtcttaaataaacaagactgattaaaaaactaatgatagcaataagcccttgccactcccaatacaaaggtaataacagaacgaacccagttattatccatgaagcagttttgggtaaatggtctgtcaaagaacggcctaagcctttttcgcggacatatggtgtagttaaaaacaaaatagatggcaccacacgcccaaggataggaatgcatattaaaaataaagattgatgctgttcaatcaatacataaatcagtgcaaatttgagcaaacatacgataactatgctgaggactccaattggaccacaacttggatccttcatgatttgtaaagtacgtagtttatctccaaaaccacctacccacgcatcggcagtatctgctagcccatctaaatgcaatccgcccgttagccagatccataaagcgaatacgattgccgcaagtaaaagagcgggtaatttaacaaaaatacaggtaacaagaaaaagtatgcccccaataatcagaccaactagaggataaaacagaatagctcgaccattttgttgcgccgttggtattgtttttagctcaataggcagaatagttaaaaattgcaatgctatccaaaaaggtgccatatccaagtctctaactgatctatatctaaaaacaaattgaattatgaagaaataaaaatgggaatagcaatccctattcccattaaagacttcaaaaactgaaaaactattgcatttgatagcactgtttcaatttgatgtagtcatagtaaaaactggttggtgtataaagtgcataattacatgcaggtttaaataaagtttctttttcgttataaagcatttttaccaaagtagagccttggttattttggtaaatatcccattgtaaatttgccgccataggtgaaattacttcaccacgccatgcgcttgtcgagtaattataagtctgacgtagtggtaacggctgcatcatattatgcaaatctaagctagttgctaaaggaataataatttcagcatgggcaaaacgtaaaactgctttataaggttgggctttattcacaacagcatcaacttgttggaacaggtcttgtttaagtccttgggcgatttcactggtgacttgatttgattctgtaaagcttggacctttttcgtaaaaatcattggcatcattaaattcagcataaaattttgcggcttccaaaggcatatatttatcaaaattaataccttttaactcatctttcataccaccagaaattgaatagagttcataaatataagccgctgcatcaactgcgctggcaattgtatttttccccttacctttttctgtaatttgctcacctttaggcggagttactgtaaaggatccggtattgctaaagctataaccagtggtaccgagctttttaatgaagtcagctttaaaaatcgggctgagtaccatttgggcagttttttcagcctgagtatttttagataactcatctaacttttgagctaaatctttattattttcttcaaaatcttgataagcctgacttgcatcatatattttttgttggctaacactcagtggttgagctaagtcttcgtctgcattcaagctatgaaaataaagtttaaaacgatcaacgccaccatcttcaacacttggaacacttccactcgataaattggtataagacaatggaacaattttatctttcagttggggttgttgtttaatgagttcagcagtgaaaaatttagcactatctaccgcacggtctactccagaactttgtaccaatataggcgcctgcgcatttaaaagagttggtaagcgctgtaataatcgatcggcaataccgcggtgttctaaaataccagtcatggtttcatttccatatccgtactgacggatcccttcaacaccataacctaacaaaatattcgctttcatcattgcttctaaatcagcacctaattgctcacctagcggcgttaaggcattttcagctttcgcctgtttccataaattataaagtgctaaatcatatttcagacttgataaacctctcgaaccgtgacgtgccactaactctgtaaaaactggctggaacccagtcggcgcttgttcatagctttttaagtcttgttgaggttggtaaggcgttttcgtttgataatattttgatgggtttgtagatggtgcagtttgagcttcttgatcatcattgttattacaagccgcgagtaataatgatgctgcaagcacagttgttttaaataaaatattcataagccagatgtgtgattaataagaaatgccaatagcttagatactagcaatgacagttctattacacaggctaaaataacattttaaaaataataacttacaagtgtataaaaatataaaactactatcttaacttaaaagttaattgaccatctgtttcagaaaattcgagtgaatataattttccaagctctgccggcattttaagtaagtcatctagaggctgttgtctggctaaacaagccaatagcttaatcacaccgccatgagtaacaactaaagcatgctgtaagttttgcttttgcatatgctccagcaaatcttgaaagcctttaagaacccttgtttgaaactggtctaatgtttctgcgcgaggtggacaatattgacttggtttttgccaaaagtttgccagtaattcgggtgaagtttcataaatttgctgagttgagatgccttcccattcaccaaaatacatttcttttaagtcatgatttacaagtaaggggagttctgctgttttggccagttgctcggcaaaacaaacacatctttttaatgatgaacttacaatgacatcccatggctgatttgaaacttgctcaatggttgcctgcatttgctgccaaccttttgctgttaactcatcatctaaatggccacgtaaggtatggctatactggctttctccatgtctgagcaaatcaatcctaaatttagccaattttatttccgcttacagccgcttgagcgaaggtagccatttggttatgtaaagcgcaagccattttaaccaatgccaaagcagcgccagcaccactaccttcacccaaacgcaaattcatttttaaaattgggtcagcattgagttcttgtaaaatacggcgatgtccatattcagccgattgatgaccaaacaacatccaatcacgcacttgaggattcatccgcacagcacataaagcggctacagaactaataaaaccgtctacaatcacaggtaaacccacttgcgcacagcggatataagcacctgtaattgccgcaatttccaaaccacctacagcacatagtgttttgaagacatcaccaatgacatgtttatgatgaagttcaattgctttttcaattacttcaattttatgtcttaactgatcagcaccaattcctgtacctactccagtcaattgctcggcagtatcatttaataaaaggcatgctaaagcagaggcagaacaggtatttccaatccccatttcacccgcaatataaatatctgctccattcgctttagcagtatctacactttttttccctaactctaaggcagcacgacactcgtcagcattcattgcagcttgtttggcaaaatttgctgtgccggcacgaatacaatgacgctcaacacctgcgtattcgtatgcttcgcctactgtgccacagtcaatcacttgcaaatgagcttgatgatatttagcaagcacactaattgctgcaccacccgtcgtgaagttttgcaacatttgacgggtaacagcttggggatatgcagaaatattttcttcaactacaccatgatcacctgcaaaaattgtaatccatggatggttaacttgtggatgcgcatttgattgtaaactggcaagtgtaattgcaatttgctctaaatcacctaaggcaccagtaggtttggtgagctggagttgatgttgctcagcttgttgttttgcatctaaattaggttgctgtacggattctaaccaccagttcatttttatttctcaccttttaaaatcattggaaaaccagccacacaaaacacaaccttatttgcaatttgccctagagcttgatgtagtctgcctgcttcatcgacaaaccgacgactgatctcaccgagtggcacaacgcctaaacccgtttcattacttactaaaataacttctgactcaagcgtaggtaaaatttttaacagctgctcacattcaaattgttgaatattttgatcttctaaaagtaacaaattggttagccaaagtgttaagcaatccacaagaataatctgattaggtcgatcaattttttgcagagtttttgctaaaaataatggttcttcaaccaaagaccagtgagcaggacgctgattttgatgatgggcaatccggctttgcatttctggatcaagcgcttgcgccgtagccacataagtgacagctaattgcatagatatggccgtttgttcagccaatcggcttttgccagaacgggcaccacctaaaatcaattgcaacatgaatcacctaaaaacaaatgctgatacggatacagctgaccttgtaaaatttgagcttgataatagccaaaggttaaatgctctactttaagatcaaattcagcctgtgtgtattgtacaggtaattgagaaattttttgtaaaatcaaattgctactatagtctttcttatacaaacccaatgtaatgtgcggacagtaatctaaagcggcaatttcattagaaactgtgtctaatttttgccgtatgtgagataagatattttcgatgtcttggacttctacaaataaagcactactaaaactatcaactgatccaatttttaattgaaatggtgcaatatcttcttttcttaaaatttccccttgctgcacaaagccactaaaacaaaagtcatcatcatgaactttattttcatgggtcaagaatccacatataaacagcgtgacatgatattgacggtgattaggttctactagaaattctgaaaaatgcgcacgcaattgatctagataatgaactaatttctgatcattaatttctagataccacaatgcgtaattttgacgcccaaggtgccattcgggataatcccgtataggtgttggcaccatgggtgtggagggttttaacagcacggttttaattcaaaattattcaaattttgtattaaaacatgtttgtctttcaattgttgaggttaattcaataagcaaactcaaacatattgatttgatgtagttttggtattgttcagcttaatgtccaaaggttgtttaccttgttcagaaaacaaatattggataagttgaaccaattcagcttcaagctgtcttctttgagttgtactcaagtctaggttctgaatttgttgctgcagctgttcaacagctttagtctcttcaatttctaaaaattgaatcgcataggcataacctaaagcagcaccttttaataaatttttataaggcaaatcatgacaaatattcacagcaattgatgccatgacacgttcattatgattgagtttgcgtagtggatctctagctacgcgttgacaaggatctttaaatgcatattcacatgagtctagaaaactttgtgacattcgatccagatcttttgcatagttaggtaatacaatagcaagtccctgcttcacttctgcaattaagttctctgcaaatgctttaactaaatgatcacccatggcaacaccaatagattcataacccattaaagatgcataccaagcaagcatcgcatgtacaccattccataaacgatttttaatgagttgaatgtcagtaatttggtcaaccaataccacctgacgcaacttttcaagtaaaggactgcctttctctacatagattggcatatcagtttcactatggaacaagattaaatccatgctttgtaagatatgtcccggctggaaattacggcgcatgttatcaacatagatagaagcctgatttagttgttcttgattcagtttattacagtcttcaatttcgatttggtcttcttgctccacatcttctaaatgctgttcaagaaaattatgcttaatacgaagttgacgatataaattctgattagaaagttttgaaaccatgcgattaactacggtgtcgcaaaagtaatgctcttttaaaatatgctcggttacatcttcatcgttggttaactctagtagagcttctttaagatgcttcataaccaaatatttcgcaccaaccttatttaaaataattagaaaggttaaaggttctatacatgtttcaagttgcgaattaaaacgcgcatataacccttttgcaattatctttgattcaggttcgatcgcttgctcaggcaaacataatgcaatcaaacttgaatgagtatacatctctaacatttgttgctcattgtcagaatcaacaatggtcatattttcaatacgttcatcataagaaaattgcccatagcgaatactataggttccaaacgcatttacagcttcgcggaaaagactatttcgtgttgacgcaattatacgttttggtttcgtataaccatcccaatgcgacaagatctgcgctatataaccaccgccaatagcaccgaaaccatgtattccaacagtaagctgattcagactttgcggaaaaggttcctgcatttctggcatgtccataacagggataaattgatcaagatcggttaaaaagtcatacatctgatcataataaaaatgcgctttttccagcatttcatcatttggttctttaatatcttttaataaaatcgttaaacctttcgatgtatgtgctgaagttaaaccattttccgaatcttcaaacataagacactggttagcgtctaaatgaagttgactagccgcttttaaaaagatttctggatgtggcttcccttgttctacttcatccccacaagtaatgacatcaaaaaatttataaacatttgcattaattaaatattcttcggcaattgctctacggcttgaagtagccacagccattcttaaaccagattttcttaaacgctctagaacttgaaccaaaccttttttaataggcacgccgtgttttcgaatatgttctagttccatctcatcggcacgttttcgaatttccttatatggaacatctactccgtataaacgttgtgcaagcttttccgctgtagtcgcacttaaccccaaacattgcattaaatattcgtgtgaaaactcctgcccaatgagttcttgagatgcctgttgcaatgtttgaaaccgcaaccgttcagtatcaaacattgtcccatccatatcgaagatagctccatgaacaggttttccatgaaaaataagcacgtttttacctcttttttgatcatgttttattcagggtatacaaaaaattgctaaaaaaggcaggatgataataaatgaaacattagtggttattttttaaccaataatataagcaatctgttactgagaagagttaaaaactcaaaaaggttgaacaatatagataattctgaaactgagttttaagcacaaaagtagcaagccttcctcgcgtgctacttttgcttcttctttttatgcgctgatcatgtttatttttcttaggtccatttactgctaaacagacctgcattgtttttattatgtcttgcaggtctacccataccagaaattaactcgctttttgctgtaatttttgttgcgatgcctggtataactcaaaaaatctgtcatagaacttttcacggaaacagtaatacaacattgccgttttttccggcattggaattaagccctgctcttcatagcacatgtcttctactacagccgcataaggcttcactgtatgatcaggttctcctacaattctatttgttggggaattttcaaaaatatagaaattcaataaacgaattgttgggcgcaaaaagccttgaccaaaagcagatttctccccaaatagtaaatgccaacctaaatcattgtcttcacctttataataacgagctaggcgatcacgcttcccttcataaatttcggcataacccacgtcttgaccattgattcctacaatcattaaacgttgatgatcatcagctagcattttttcaaaataaactttgagttctatttcgcttttatttaattgccactgaggaataacgtgtggctcatgcatccagcggtgtaatagtggtatatcttgaggatactgaacctgacgtaatgagtagctaacatcattttcaatatattcaaaataatctgggagcttttgtgaaagcgtaagcattataacggtccttgctatgacataacctataattgataatgataatcatttttatttaagatgcaagcttatttttactattttttttattgcataaattatggacaaaaaattcagctttcccctgctaatatttaaggtaccaactcaacaatcgagaaaataattgcaacgacgattaccattaaccaaataggaataaaatattttctaaaaaaataaaaaacaataatttgcaaaaagaaagcggttgtgatgatcgcaaaaaaccatgataagactcctactgagcttccttcaaaggagcaattcaaaaacaatgaactaagcaaaaataatatggttgttccatataaaattcgtctagatgtacttttaagccagctatattgaagctttttctgaccaaattggctgagcatacatgcttgcattatggcagcaatagcccaaaataatgatgcaaagctcatttggcctctcctaacgtaataaatttggtttggtagaagcgtagtactactaaatagaatagcccgagcagtatgagcgccagatcaacaccgacaagagaccaatgcacagactttagactatttaataaagaggcttctggcaccagaacgacactaataactggaataaggaataaaacagcagccgtaatatatagcatgatgattattcccttccttattgagcagctaaagctaatcaataagcttaatagccatgctatataaaatgctgaaacctcgtatagttccctcggctcaaatgaagcaggtataatccgattaaccattaaataaaaggctgaggcaaaaggcagccctaagaaagtaaaaaagttcaaatgtcttactaatctatatccaaatttcttttgttctttgatgcgctttgtttgccatagtaatgcgcctgcaaccaacatgacacatcctattattcctaaacaagccaaaataaaacgcatccagatagaagcaaagtaacctaaatgaatcccataacttgatgaacctaattgtgcaattgcacttaaatttcgtggctgattgagtcgttcagccgtatttgttgcaaaaatatattgaggagtatttaaggtaataatatttttatagttatagtcaaatgtaatcatgccatcggctgtattaggcttttgaacttcaaatttatctaaaatagctccagattctgttcgcttaggcatttgtgccatgaattgattaaaaggttgcatcgcttctgttaaggaaggttctcgaggttttgccacctcggtaaactgcatttcattatagaacttaggtataccagctttaccatattgttccgataatccccacggtaaaactagataaaataaaatcaacagtccagtaaaggccatcaccaaataaaaaggaaaagtgataactcctgttatgtgatgaagatctaataaagaacgctgtcctttaaaagccctaaaggtaaaaaactctttaataattttcttatgcgtaatcacacctgtgattaaactaattaatagaattaaggcaacaacagctacaactaagctaccgaacgtgcttggcaaaggataaagcgtgtaatgtagtttgaaaaagaaatctccacccaaagtcttccgtacaggtcctaatagctctccggtattagggttttgtagctcttgatgtttcccctctttatcctgccattgaagtaggttcacaggcatccgctcattggctactgtgactcgccatcttttggcatttggtgcatgttggttgagatagttaaacgcagtttgcgcagaatgttgtgcagaagggactgtttgaatatggctgattgcttctggctgtgcccaaacattaatttccgttcgaaaataagcaatagagcccgtaaaaaaaatgaaaaagataacccaaagaacaataattccaaaccaactatgtagtattgcctgaatttgacgaaaattcatttaagccactccccatttagctaatagccaatagctcactaataacactacgcctaagctattgatcatccaaaaccatagttttgataaaatggaactcgtaaagacaatataaaaaataaaaaagataaaactgataaataccgaaaaataaacattctctgctttagcaaaaggtaaccatttagccaaaacaaggctgagccatgaactgtagcaataagcggctaaacagataaaaaagatcctgctatacgtaaaattaaaattttcttgtttttttagatgactcatttaaatggccttaaaaatttaaatatgccagatttgattgaaagaaatacctgctctatacaggtatctctttcgttagttgcattaatagttaaaagtataacttaaaccataagtacggccttctgcagggattgctaacaacggattagcattagagacggctgcttgctgagcaaatactgttcgatactgacggttccacacattataaacaccaaaatctacacgacctttccaagccgggaaatgtgctaatacatccatagtggtataacctttgatttgcgcagcactattcgcatcattctttacagcgttttggaaagcttcatcttgagttgttgcaaatgctgctaattcacggtcatctttataagctttatttgttcctttaatagcttgcatctgaacacgaacaccatacccttcattattatcccattcagcaaaaagggttcctttcactggagcaaccgtaaatgagtttaattcatgccatttattcgccacgtctttatactgaccacgggtatatcctaaagtgccaccgaccttataattttccataaatggataactaatagttgcttccgccccgtatactctttgatctgtatctacaacctttgctgcacgattgttgaattggacagttttatccgaagtattgtaaaaaccagtcaatcccagatttaggccatcatcctgattcaaacgccaacctagttcataactatttactgtaattggctgtagatttgctgttgaaacggtataagtagaaacatcgcgcaacatacgttgtacgtcagggaaactaaagccctgagagaaattagcatatacctgctgtgcatctgtaagtttataaactgcacctaaattaaataacggcttatcatcatgtgttgatcctgccggaaccattgttgtctctcggctaggaatataagcatcggtatccgcttgaatatattggtaacgaatacctgcttgcaagttcaatttatccgtaactgcataatcgctttgaacaaatgctccaatattttgaatttcagtatttggcccataacctttacgttggcctgttggcgtatacactaaataaggatattgagttgctaaaatatcaacaaattgcttatctttttcccaatcataatcaaggccataggttattttcatatcccgattggcgatattaagatcggtttgcatagttgaacgtaatccagctacttcaatttctgattgagactggtttacaaaagtcacggatttatttgataggccatatgggaagaaacgtgatttttcatttctataatatgcttcaacatttagtatttggcctaaaaagtcttgattttgatactgtgaattaacagcataacgctcggtaaataatggattactaagctttaaacctttaattgccttataagttggcgttgtagcatcattactcttagaggttgtcggtaaataagagtaatccggtccgtagtcagtatcctgcttatctttatagtactgggcaccaaagctcaatgtctgagtatcatttaaattgaaatttaaacgcccatttacatcgatagtatcagtgtccatcgtactaccttgccaagggcttaaggaaattctatcgccatttccatcaaattgagaccctctacttgtaaaattagctcctaagaaaccatccatattgcctttattaaatgagacagattgtccgacttcataagctaagccgtcactacggaatgtatctgaagatgtaatgcctacttttgtttcaaagctaagtggtttagatgtatctgctcttttagtaataatattaataataccgccagtagcacctgacccataaatactagtcgcacccgaaattacttcaatgcgttcaatcataccaggactaatactatttaattgacgcgaaacatcgcgagaacctgtttgcgaaacgccatcgatcatgactaatacgtttcgtccacgcattgtctgaccataattacttgttgttccactacttgatgcaagagatggtacaagttgtgcaagaatgtcggcaactttacgacccgccgtagcttgctggataatttgtttctgatcaatagattgaactgtacctgcaatctctgcaatattttttggtgtacgagtcgcagttactacaatcttttgcaattgggttactggtttttgtgttgcattttcgcttacctcagccgtttgagttacggtttctgcataagcctgctgtgcaaaaatagccgatatggcaagacaacaaggtgtcatcttaaaaagtacttgttttgaacgtatgtgattacgtgctttaaccccaatcttattgtttacattcattttttccatttctccctagcccaaatgttactcaacgatttttcaagaggcacgacatcatactaaatacgaacattaatgagaatgatttttattaaaaataatagtcatctatgttattttttaaaaagaattcatttttcttattttgttcattttgctcaagcatttgaaattcttttaaatattgctgtgccacatccatttttattataaatattccatctgcatcccctataatcagatctccagtttgtacgatggtatgattaatatgaatcttggcatctatttcaacgagactttccccttcattgcgagtggttaaacaactggttgtatgagcaaatataggaagtttgagttgaagtaaagcctgccgatctgtaatagctcctaagaccacaacgccagccagaccacagtgtatagcggctacgctcctttgctctccccagcaagcacgttgtagatcatatcttgcatcaataacgagaacttcatttggttgacaactcatcaagacttgtcttaaaccactcgcattgatcgattcaatccgaactgtacgtacaatccccaccaccttatcttcaggtcttaaggggaatacctgtgcaatatatccctgatcaagtacatgaccaatagtagaggttgctatttctttatatgctgtaacaagtgctttagaagtatcaatttgattcatctttaaattttccgatttcttttaaacgtaagggacaattacggcataaggtctgctcagcctcttcgagctgaaaatagaaacagcatttttgtctcataaaagtattaaattctggatgccatccattccataaacgcacaaatggattttcagttaaataaaaactttcggcagcttttgacttaaagaattgtttttgctgttctaaccgagactgtatatccggatttagattttgatttgtaaaagaatgataaaactgtactactcgaacagctacattttcccagagtaatacataaggtacgcgacctattttcgctaactgcttaaataacagattaagttgttctatcaagtcattaaactcttgcaaatgtataatctgaacagaataaaaacttgtttggtttaactgtaaagtcctatcccaataccattgttccggcaagtctataactaatgctgaactatcccattttacaaatggcaaaacagccacatggcaatataaaaaaggtaagatccaacttgtacaccaatatttgacaaacaatgaggtcgcacaagttagatttttagcatgaatacgtgttgcaaaatcctgtaacacctgtcgacatacatcatcattcaacagacaatctaaggttgttgaactttcaggtagtatttgaacatttaatttcagacgctgttgcaatataggcagagttgcgcacttctctgcctgtattttaaaagacgtattcatcgtcagatatcactaacaatttaaggcataccaaagtgggtttcgggttttcccaattcccgttggcatactaccaatccgtgtatcttgttctagcaaaggtcgaagtaactgcttatatggccattcaggcacttcaaatagtaaatgttggagctgggtcaaaatctctggctggaagtttagattttgaataacttgctgtaacgcatgagcaagtacagaccatagatccttaacttcaatttgataatgactcgctaaattatcaacaatacaccctagattaacctgaatacctaaagtttgaatataaaataacagagcctctaccgattcatgataaagcgtatttctaaaatcatggggactcaaataattaggatctttcaatccgctttgctctacccaaggtaaataaatacgtaatgaatcatgatcacggaacatcaatccatcaaattcgccatttttcaacacaagacatatgttttgcccatgaatttcacccataagccctaagcggaataatcgcaaatttacatcaaagaaacatgtacacagtttctcaaactcgataagtatctgcttggagtttatgtccttgtgttgaagctgcaaaatataatcaaaaatggcaggctcacccataattgtatgtccaagacttgccattggtataagttgataaggttcttgcaataattcagctggaatatgacggcgctgagctgccaaatgggtaggtttctctacaaataaccactcattgtctgctgtccgatcattttgcttctcgggtaaatatgaccaccattgtgtttcttcacaaagccataatttttgttttaagacagcatcttttgccttggcttgctgtaataatttctgatttttttcaccattaatcattttcacaataggcaaaaatcttaatgaaccaagagctttaatccctatcggtaattttagactttcttctaaaacattttttgataagaggctacgcatagacgcactggcatacattcctttagagataaaattcaaaggatgacaaacaccgtcggcaatatcatccgcatagaacttgggaaataaatgctcaaattgccaaggatgaattggcattgcaatgtgggtttcatttaacccacgttgaaacatttcctgttttaattgatatcgctcagcacgaggaataaaaatttcgcttggctgttgtttgaaaatattttctaccccttcaccaaacatcattttatccttatgtacagccacccaatgaatagataattcttgagcaaattccggacaatattgcatatactcttgctgactgagaccttcttttaatttggctaaaggatgatatgggcggtcccgataacctgcatattgctctaaaatgcggaatctatgtgccaagctttgattcaataaatcatgtgcatttacccgatgttgttgtaataaatgatattgctttaaacatttttgcagctgctcataaaaggcttgaactttatcagtgctacactgattaaaaagacctatcgcttgaataaactcaaaaagttctattatcccaatcacattgatctgaacatgatcatttgtgcgttccaatagaaaaacttctgtttcattagcaaacttccaggcttgagtaatacctttttgtaccgcaaacatgaccaagccttgccgactctcttcgtgtaatagcacaaaagaaaattgttcagacgtgtttttaaatacttcttgaagatttttgccatgttgatttagcgcagtttgggcagtcgcaaaatcaaaaataaactgttcaggaataatcgtttcaaccagaaggctattgataaaatcctgtaagattccttggtccattacttgataaacgggctgaagtgcattcatagataaatctcacttcacctgcaatttaaaaggagctaacgggttatcgacaaatttaatttgtatgctacgatcgccaaataaacgccgtttagttaatgactcaatgcgcaatttttcggcaaaaacatcaaataattggtaacgtgaagcatgctctggatgttgctgctggtaattttggatgacttccgcagcccattgccagaaatttttttctggaagatcaaagttttgatttaaaaatattgcaatatcggttaaagcgacaaaaaacagacaggcacagctaaaatcacgaataccatttaaatcatctgtcaaaataaatgacatactgttggtttttgcatgctcaggcggcaactgatcgagttcaggagccaattcagggtgtgctaaatgtgctggactatagcgcacaccatcatggaagtcctttaaaagaactcgcgttggccaaccttgtttatgtacaagaataatattttggccatgtgattcagttgcaattccctccgcaaaaagtaaatgaatcaaaggagtaatcacaactttcaaaagttgacgtgtccatgattcaacaccatattgctgtaaccatggtgcaattaatgcttgcccatctttttggatatgactcacgccatttaacggtattgcatcttcaccttcacgtaaatattgatgcacactctcacgccatagacatccaattgtaccataggcctgttgagcatgtgattttggcaatttagtaaaatccacgcttaaaccatacacttcacgtaatacagcaaaatcaagctcttgggcggttttgctctgtttaattaagcgttgcaaccagtctgtaataattggcccattcattactgtatgtttagccagaacacgtgagcttgatgtattagttagactcatcgacagtttgatataaggcttttccggatgctgcaagttagtcatagtgcgtagagattgttgggctaaatagcgatcctgactttgccctaaataaacaattttgccatttagaatttcttcagcaaaaatagaaattaaatggttttcccattgccaaggatgaaccggaatccaaatatattcatcagccttcaaatcacgatctgagagatgttgcaggaatagctcttggtcttgtgaattcaattgctccttaaaaaataaatctggctctatatcttctgaatgtttttttgcaacaatgtcctgatgcacagccaaccagaccaaggcgattggttgggcgaactccacaccatagcgtacattgtcttgtaaactaaaacctacacgtgacttgtaacacggatgatatggatgaccatccattaaatatgattctaaaatatcatatggatattgaattgccggcaaagcatagtgatcaaaacatgcttgagactgtaaatcatgaataaatgttcgttttaattcaaaaataaaatcttcaacttttgctgcatcggttatggttctaagaatttcatcaataactaaatttaaagtagcaatctgataatgaccgttttcatcttgacgaaatacatcctgattacgggcaaggcgtaccagtttgtaactatattgtctttgccctgcagcgacataacgaatggtttggcgctgactattttgtacttctataataaaattttttccatcatattctgaatgaataatatcttcaaaaattaaagcttgaagtaattgcttaataacacgttgctcaacatattttgcctgatccgaatttggatgttgccaagcctgtaaagcattttgaatcacatgtgtatttgataaaactggatgtaattgtcccatttttattaatcctatttctttaattggtcgattctgtactgttcaggaaaacgccatgcgaaaggcaaagtgcaaagtataagaattgcacaacacacaaagatttcctgcatagtgtgaaatgatgtaaatattgcttgagtatttaacggcaatgattgttgtcttagctgaagatataacgcggcaataacgactgccactgctgcaaaaatacgtcggaataaattatttagagcggccgcttgagtaactagatgctgttgctgctggcgtaagctgttcaaacctgccgtagtcgatggcatataagaaagtcccattcctaagccatgtaatatcatacaaaacacaatgaaccagacattttgtataggtgcccaagcaagcaaaagaaaagaagccacagtaatcattagtccaagagacatgatttttgcagcaccgtaacgatctagatattttcctgcaggttgactacaaataccggtaactactgcactgctcattagcgcaaaaccagtccaaagcgggcttaactttagaaggtgctgtatccatagtggaatgagcaacatgccaataaataagcctactgtttgtgccacacaaatgactaagctgtagcggaaccccttcgtagcaaacaaagctggctcgattaatggcatagacttattcttttgtacaaaaataaatcttataaaaagcagcatacttagaactaaaagcgcaccatatagaggttgaagtaagtcctgaatttgatggatttggctcagtgtcccaagtaataaaactatgcttgaaccgagaaaaaagaatcctgcccagtcaaactcttgcttattgtcccattgctctttaggtagaaaaacatagcctaaaattaatgccagacaagcaacaggtaaattgataaaaaataaggccttccaattaagccataccaaaaccagtgctccgagcataggcccaactgctaaggttagcatgatcatggcaccccataatcctgttgtacttccccgttgttcactgggcgtaactgaaaaaattagtccaagagataatggaatcattaatccgctacaaaagccttgcagagctctagcaatcaacaccgattcaaactgattaaataaaccacctgctgtagaagccaaagcaaatcccaataaggcaattaaataaattgaccgcttaccaaaacgctggcttaggaacccagctaaaggcaaactgatactcattgctaataaaaaggcaacaactacccaacttgcccatacctcacctacctgaaaataggacattaaatgaggtattgcagggttgaaactactgttatttaaactaaccgtacctgtaccaagcataaccgtcagaagtacgtagcgttgtaaactttgctcatgaggttgagccgcggacacagaagaacgttccatacacatatcctctgttcagcttattcaatatgctcagataatttacttcgtgcatacgctcccaaagcagaatgatgcattggccctgatttatttaaaggtcttgaaaactcggttatttttgaggctgcaatattgcgaacagaaacttcttcttgcgctggtacattcactccaaattgttggaatgactgagaatgatcaagtttgaataactcttcaccaaccaattgatttgcaattgtggctgccctatatgctcctaagcctaaatcaggcgtacctacgccgtagtgataaacttccatattttgaataaatatagatccctcaccttgataattgactttaaagtttgaagccacctgccaatggtcggcctgatctcgtatgatcaaagattgtaaattttgtagaaacttagggtttggataacgataacccgtagctgcaataacacaatcagcctccagaatataattcttattttgctgacggtgttcaaaacacaactttgttttctggttttctaagagctctgcatattgcagttgatgatgtccagccaacgtaacatctgtaggcattccaccgatactacgatgatataaacgctcataaatatcatgtatcgttttactgctaatacctttatataaatttgcttgttgcgctggtaactctgcctttaaacctgatggtaaatggtaaaagtaatgcatgtaatccggactaaaatgttctaaaccgaatggtgtattttccattggaaagaaaccagcagaacgggttaaccaataaagatgaaagtctggtgtagttcgaccattcatatactgacgatcaaatagatctaaaaaaatctctgctgcggactgtccagaaccaattaaaactacatttcctgataacttctgggagctgtactgtaaatattctgatgaatgcagacaggttcctgattttgagtaaatcttttgtaagctttctggtaaatgtggagttgtacccactcccaataccaattgtcgagtacgataatgttggtggtgcccattacacactacctccacatcaaatccacctttaatcggtttaatatccagcacatggctactaaactcaatatggttaagttgttctacaacccattgacaataatgattatattcctgacgcggtatatacaaattttctctaaaatagaatttatataaacgttgatggtgttttaaataatttaaaaaactaaaagggctggttggctcaaccatactaaccaaatcagccataaaaggaacttgtaacatcgcattgggcaattgcataccagcatgccagtcaaatttctcacgctgatcaaaaaagcgatattgcagctcgcttttatcatgtaacagactagccagacttaaattaaatggccccagtccaattccaataaaatcaagcatagctcacatccttctgttcaacgtacagtggatttggtagctgcacatacacagactgatgttctaatggtgcaataagctcatctaattcatgtaaacgtgtaagtaaattgcctttatacggtaaagaatcgttaaacaataaaccctgtaataatgtgctatctggatattgctctaataattgaagtaaattttgttgcaaatggattaacagttcatcttcagaaatatagccagttgctccaattgcattaatcaaaccaaataaagtgttgccaaagaaataataactaaagcgttcatccacaaaatctttaggaccaaccgcatgagctttttctagtaaatctggtaatgcttctacaatttcagttgcaaactcttcaatataataaaagccttggttgtcacgtaaccagagatttttcggtaaaccatcttctagctcaagcaatacattttgttgatgcgattcaaaagccataccgtatttatgataaacatacattaacggagccaagccaatcttcaagaaatgatcaaaccaatccaaagcaatttctttaaaattcgtttgttgatttttctgagcaatttggtcaaataaagcattaaaacgatttaactctttatttggatggtcttgacataaagatgcaatacaagtgacttgttgctgtactgcaaatggttgatcacggaaaatacaaattgtctcgttaataatctcgccgtctatttgcagagctatccaggctggatcattaactgctttcaatgttgggcattgttttaatatttttttacctaaatcactgtgccataaacgataagaaatttcgccacgatgacactcttttgccaaattcactcgaattgaattagtgatcatgactgatagtgaagttttaaccatccaaggggcgttaaaacttgccaaggtccgaattgatgtagtcggtgaaaattgccatccacgtaaaccgatatcaattaactgtcctgtttgttttaattgctcaaaccaaggtttaccttgtaaataacgagcttgccaaggatgtagtggcaataatttaaattcaacatgagtctttaacaggtttaaatcgctttcggacaaataccaacggattgcgtctttaacttgatctgaaattggctgctcagttgcacaaccttcagcaatataattctgatgaacaagccaataatataactgagtttttccagcatgttcaggtgaaaacttcaaccaatcttcatgaacaaaaccattccggcttttaggcgctgggtgcatactatgacccaaaattaatgcctgttcgctttcaataaaattctgtccagcctttactaaatcatcgaaatcattatggcgttgttttaagaattgtagtagcgcgtcccggctttgtatccatttctctaacaatgaagcagcatctaatttgaattgagattcaataaccaactcttcaagtaaaagactaacaatggttcctgcactgaatttttgccattgaccatcaatacacattttcggtaaagcagcgagacgatggcgtcctacacgacttacataagataaaggtacagagcattctgcttgtatagaaggaagaggaagagttaacagcgtcaaaccagagctaaacgcttgttgagttgaactttgttggtcaaaagaaagtaaatatcctttgccagtctcttgcatataagcgttgacgaaattttgtatcgccaatcggttggcaagttcttgcatctgactacatcctattcagaatcttaagcttttgttttaaaaaatttctttttaacaatttgttaaaaacaactgcttaatcatatttagtttatgatttttctactcagccaatgtaaggctaagaataatattaatgataattattatcatttcattattcaacatactgaataatttttatttttttaataactttttgaaattaaatatgtttattctaagagtgactacttaatgtaaatttcttcactaaatttaacaatagtattaaatgataatattctcatttacaataggttttcattataaaacccgacttgagccaacccactcctgcttaaattaataagtagtcctcttttcataaatttaatcaagtacgtctacaaattgcgccgttaatatttgtgctaaatctttaggatttacaccaatatctaaccctctcttaccaccacttacataaattttgctgagctcttgcgcagaggcatcaattactgtcttcaaacgtttcttttggcctaaaggactaattccgcccactaagtaccctgttaaccgttcggcatctttaggatttgccatctgtagttttttacaccctactgccgtagctactttttttaaattgagttgatggttaactggtataaccgcaacaaaataatttttctcataggtaaccagaagtgttttaaacacctcatttacattaaggtttaatttttccgcagcttctaagccaaaacttttagcatttgcgtcatgttcatactcatggatagaaaattcgattttgttactttttaacagtctacatgcaggagtcataggagtttaaattttaatgaaatgatattgattatatttattttaagaaaagtttaaaatttgcttaggctatttacatcatttacatgaaaaatcaaacctacaccgaacaaaaaacaatctaaacttgatattgagtagatgactccaatatatttagttgagatttaaagtctgaactggcgaatttatgagttacaaacacaataatctgatggcaatgcgtcaccgtttttgggatgagtcttcagatcatgtattaaatgaaaagcaatttttacagcagaccttaatcgaacaaggcatttttaataatgcgacttttgatgatgttaagtactttttctatacactgcctagcatcgttattgtaaaggctcatgcgcttggttttatgcatgattccgtcaagcaaatggttattcaacatattcaagctaatcgtatgcatttaatgcaaaaggctgaattgaaaattcagtttaaaatgtaattttacggttagcatctgatacgacgttttatagtggtttatttttctgagtggtggatattttaattttctctctaacgcttaggctatttttagaaaattaaaatctaaaatgagactttcaactcaccattcagtctgagggaactattttaatacgttcaaaacatgtaatattcgttacaattttagatcaccagcgtttggctgcatgatgcgcataggattctattttcatgtcaaatcagaacgataagcttaagagtttaaaaacttcttccatggatcgacgcttatcaatcgcgaaagcttctttactggcaggaacacgttgggctactgcaagtgcctcttccctcttttctagtgaagaagaaaaagagaagaagcgtaaaaaggcaatgagcgagcaagctaattatcttgtttctgaaattggcaaactaaaaggttctattgtcaagattggccaaatgatggcgctttatggtgaacattttttacctgaagaaattactcaagctttaaataccttaaataaccaaactgttgctttagactggccagcaattaaacctcatttacaagaacaattaggttctaagttaaatgatctaacaattgaccatgagcctatcggtacggcttctctggcacaagttcatcgcgcaacacgtaagtcagacggtttagagttagttttaaaaattcaataccctggtgttgcgaatgcaattgactccgatatgagcctgtttaaaaacatgcttaagcttacacgtatggtccctcaaactcgtgagtttgatcagtggttcgatgaagtacgtgaaatgatgcatcgtgaagtcaattatcacgtagaggcagccacaacacgtcgctttgctgagcgtttaaaagatgatgagcgctatatcgtccctacaattgtagatgaatactgtaccgatcaagtcttatgtatgacctttgaacgtggcgtgccaattaatagtccagtcatgctttcccttcctcaagaacgtcgcaatcaactcggtgaagcttcactagagattgcagttcgtgagatttttgaatggggtgaaatgcaaactgaccctaactttggtaactaccttgttcgtttaggtaatggccaagacattcaggataaaattgtactattagactttggtgcgatccgtcagttcgatgaacatttactctcagttgcacgcaatcttatacaagcgggttatcagcatgataaacatgcgatggttcaagcaatgactggatatgagtttttcgatgcaatgcctgaaagtattaaacccggcatggccgatgtctttttacttgcgacagaagcattcagtacccctgcaaataatccagatatgccagctgggctgatggatgaacatgaacgttatgactggaaaaagagccagttacatagtcgtgttatgcagcaagcaagcaaatcaatggcgtctcgatatttctcggttcctccaaaagaatttatgtttattagccgtaagtttattggcgcatatacatttatgactgttattgatgccaaaacaaatgtacgacgtatgattcgtaactttgcttaatattattaagactagaatgactccgtgtcattctagtcaatccaatcaaaatagttctttttaaaaatttattttattttttgaaatcagaaacataaaccaaaacctattttgcttttaccatttatctactcattttttgaatgtcagcaacgacatagttttttcttatacagcgtgtcagcataaaacaataacaatgtgttaggacaccataatcatgacaaatatgatcaataaagcccaagggttgggtttatcgctgatcacaaaactagctggaagcgatgtacttgatcaactcaaactacgtaaatttcttgaaaggtctctttaccaaggttcaaaagctggttttagagcattaagtcagactcagaaagcatttaaacctaagcaaattccccaacaacgcctgcgtcaacagaagaaaaacctatttgatttaagcctaactgaagaacaacaaatgacttcagaggcaatgtctcaatttgctcaagaagttttattgggattagctcatgatgctgatcagacagctcaatttccagaaagcctttggcaatatgtagaagatttaggattaaactattacgctcttccagaagcactaggtggtgtcgccgctgaacaaaatattgtaagtaacttattgattgctgaaaaactagctgaaggtgattttagtcttacagcagggctcttaagtacgtttagtgttattaataccattacacgttggggttctactgaagttcagtcaatgtatttaccttgctttgcagaagactccgacattaccgccactttcgctgtacaagaagctactccagcatttaacccttatgttttaaaaacaaaagcttctcttgaaaatgatcaatattttatagagggtgaaaaaacattagtcattttaggagatttggctgatgtgttcttggtgagtgcggactttaatggcaagccggatgtatttgtagtacaagctggcgataccatttctattaaaagtacccctgctatgggcctcaaagcaacagagacagctactttaaaattcagccatacacccgctctacgactaggtgcaacagattttgattacaccgcctttttagatttaggcaacttaatgtggtgtgcaatggcagtaggaacctgtgaagctgtaaaagcatattgtattaaatatgccaatgagcgaacggctttcggagaaccaatttcacatcgtcaaagtgtcgcattcatgattgcagatatggcaattgaaattgatgctatgcgcatgctaattctaaatgctgcaagtcttgccgaagcaggtaaaccattccatcgtgaagcatatttagctcgcattctttgcgcagaaaaatccatgaaaataggaacagatggcgtacaaattttaggtggtcatgggtttacaaaagaacaccctgttgaacgttggtatcgtgatttacgtgcaaccgcaattttacattctggcctacatgcttaagatcaatcagaggatattttcatgaatttacaaaatcccaaaaaattcaaaatgatgattgatcaggcacatgatgttgcgatcaatgttttacgccctatttcccgtaaatacgataaagcagaacatgcttatccgaaagagctggatatgcttgcttcactcattgatggcatgaatgaaggtggtgaaggaattaatgcaggggctgccggcgcaggaaaacgtggtgaaactgataatgaaggaatccgtaatggaaccaacatgtcaacagcgttaggcatcattgaaatgtgttatggcgatactgggctattactcagcatgccacgtcaaggtttaggaaactctgcaattgccgcggtcgcaaatgatgagcaactagaacgttttaaaggtacttgggcagctatggccattaccgagccgggttgtggttctgattctgctgcgatccgtactacggcaactaaagatggcaatgactatattttaaatggtgaaaagattttcgtaacttctggtgaacgtgcggactcggtagttgtatgggctacacttgaccgaaaacttggacgtgcagcaatcaagtcattcgtagtgcctaagggtacacccggaatgaaggttgaacgacttgaacataagttaggtatcaaagcttctgatacagccgttattagttttactgactgtcgtgttccggctgaaaacttgctcggtaaccctgaaattgatgttgcaaaaggttttgccggtgtaatggaaacctttgataatacacgtccattagtcgcagcaatggcaattggctgtgccaaggcttctttagagcgtattaaagaaatttttaaagaccagttagaccctaattactcgactccatatttgcaaacttccaaccttgctgcacaaatttaccgaatggaagccgaatgggaagctgcacggttacttatgctgaaagccacctggatggcagacaacaaaaaaccaaactcaaaagaagcttccatcgctaaagcaaaagcaggtcgtgtaggcaatgaaatcactttgaagtgtgtcgagttagcagcaagtgttggctataacgaagatgaactacttgagaagtgggcacgtgattcaaaaattcttgatatttttgaaggtactcaacaaatccagcaacttattattgctcgacgtgagcttggaaaatcttcaagtgaactaaaatagaaatattgcaagggagttttttaacttccttgctttttagcactatgatttatcggcaaaaataaaaccctctaatcacatgattagagggttcggtatttcaggaatatattttttaattattcagcctgtgtagcttctaaggacttatcgactacaccaaattttttgaagatttttgcacgacgttttggtgaaatatttgctttgtttaaatcccctttgtagtgatcaaatacacgcttatccatcattttaaaccaccatgaaggaatcattgctggtagtagcatacttgcatagccgcttggcaactctggtgcttcatcaaaatgacgtaacgcttggaatggacgagttggataagcatgatgatctgagtgacgctgtaactgatataagaataagttggtcactacattgttattattccagctatgctctggcattgtacgttcatattgaccattttcttttttctgacgcaataagccataatgttcaatatagttaataatttcgaatagactaatcccgtaaaatgcttgtgttgctaaataaggaatcgtacctttaccaaaaattcctaccatagaagcatggaaagcagcactcataccccagccttgcagcaattcattatcgagtgaccaaaactctttacctttacgttttaaacgatttttctcaatttcaattgctgatttaaaagaaccgataacagtacgtggccaaaattcatagaatgtttcacccatacgtgaagatgccggatcttcaggagtagctgcacgcttatgatggccatatggatgctcaatacggaaatggttgtaacctgtaggcactaaagcaagatgagataaaatatggtctatacgatcatgtttatgacttaattcatgggctgtattaatcgcaataccattaatggcacccatggaaataccaagcaaaattttgtcaataaatgaagtatctttaaggcttgttaaataacatgcataaatatttgccgcatactgtaatggaataaaactttttaccaaacgcgaataatatggatctttctcaagaagtttaatttcttcatcggttggattacgcgcatctttaccaataattgtatcaattgcaggaatcacaacgtgtaataaaagtgggccacctaaagcaaatactttctttaatgggcgtggaccaaaatggtatccagctaaaatacctaaaccaattacaggtagagccggactaatcatccataaatagcgcttacgatctatctcacgcatagacgctggcactggcataagttcttgctgaacatttactggtgcattcatagtcatatttcctttttctatatatctatatagttaaagaaatactattttcttaacagttgtaaccgtccaaaaaacctatttcaaagtctttggcattttcttccacttttttgtcctaaaaacacatgttgatctattcttatagctcactataattttattaaaataatgattgatcacgtaaacatggatgcactaagtaaattttttgatgatatccacttaaataagtctgaatatatttatataaaagcacaaggtgaatgggcttttaaaacacaagatcaatctgctttactggcttatatcgttttaacgggttctgtatatatccaattaaatgtgtcagagaaaataacagcaagagctggagatattattttaattccttctggaaaagcgcatcatgctacagactcaaaagctactgcgagtaaacttgtagatccagtcgatattaccccattatttaatggacatcgccacgatccaattgagttaggctcatcaacatctgaaaataccctattactctgcttgcgctgtcaagtcgatacttatatggcagggccacttattaatgcattaccctctattatgcatattcaacatgagaaccaagccactcctcctgaatggttgcaaataggtctctactttttagcggtcgaaacacaaaaaatccaaccaggtcatgacaaaattattgatcacttagtcagtattcttttaattgaatgtattcgtgatcatattcaacaaatgtcagatcaacaaaattggttaggtgccctcacacatcctgaattaagtaatgctttatccgcaattcatagtcaacctgaaataagctggactgttgaatcattagctgaacaatgctgcatgtcacgatctaagtttgccaatctttttaatagtattattggtgaaccacctcttacttatttacagcattatcgcttccgcttagctagccaatatctacgcacaagtaatttatcaatacaacaaatttcaaataaagtgggctattcttccgaaaccgcatttagtcaggcatttaaaagagtatttgatttatcacctaaacaatatagacaaaattatattggtactaatctcgatgaataataaaaaaagcgccgaagcgctttttttattacatagattttatttgattttagcgtgtgactttaagtattcgctgtaatcttcaagtatctgttgaccacgagattggcggtaaagctgttttaattgttgcaactgatcagcaggcatagcgttaacagcagctgaatttacattagaaacagccacaaccactaactcatttggtaagttcgcgatagttacagaccacatacctggttttggcgcaggaacactaaatgctgcacgctcaattgcacgttttaaaccttgtgaacgagtaaatacacccgctgattcaaaagcaactttatttttcgcgacaacttgttcagctggctgagttttgaattctgtcagcattgtagcgattttcgcttgagctgctttacgtgctttctcatcaattactttagcttttacttcattcattgcttgggcaagtggtttaacaccagccgcatgatagtcacgtactttaacccaaacagtatctccgttcgctaattgaatattagatgaagcattacgatcgccatttttcacatcatcattaaacaatttaatttttacgttaggatcacttaaatatggattttgagtagctaaagttacaccatttaatgattcgatttttgtacctttaacctgctgtacaacagcatctaaagaatcattaccaacaatcgtttcgttcaaactatttacggtatctgaataaacagaagcaactttatacttttcaacttctgcaattaaacgtggtttctcagcttcaaatgaaggaatttggttcgcctgagtctccgcttcaataatatgatagccatattgtgtttttactggctgagaaatttgaccatttttcaagcttagaacagttttatcaaatgcatcagaaaaaacaccaggtgcatatgcttcaactaatccacctttcgttttagaagttggatcttcagagaactgagctgctgcttgagcaaatgaaagtccaccctgaatttttgcatatacatctttagcaagtttttgagctgcggcatcatcacgagcgtctgtcgtaataaggatatgtttcactatgcgtttagcatctttttgctgagtttctacaaactttgcataagcttgtttaagctcggcatctgttgctggagctggcttagccattaaagacggagataaaacgacataatctacatcaacagaagcaggctgtttaaactcattctgatgtttgttgtagtaatcagtagcctcttggtccgatgcagttaaaccagctttataagggtctaacttaatactagccaaatgcaatgtacgctgttcagtttgcaaattcgcaatttgcattaaatcaactttactcactaaagaataatctgcaaaagttgaagtcaacatttttaaagcgtgatcttgacgtaagctagcaattaaaccttcacttgtcatgccaatcgaacgcaaataattttcatataatttttgtgaaaactggccattttcttgcaaacttggctgctgagctaacatttgctcgatttgagcattgcttaaagaaatacctaatttttcagcttgttgaatgagcaaattacgggataccaatatatcaagagctttggcttgaattaccggtaaattaagtaaactttcatcaccctttacagcagctaaatattgttctttatacctttgcgttaaagtttcaaggtctttttttgatatgtcctgtccatttacagtttttgcgacatctgccttgtttcccctattaaaatatccttcaatacctacaagcgctaaaggggtcaaaaacaaaactaaaaggactttgccgagccaacccttaatgactgtacgaaacgattccataagtattccaatattttatttcgaggagaattttaactgaaaaaccacaatgaatgaatgagcaatattggtcaattcagatttttaataaaaaacgcgcctatattggcgcgtttaatcatcttaaaagattaagcaactgaatctttaagacctttaccagctttaaagctaggtacttttgttgctttaatttgaagctcttcaccagttttagggttacgaccagtacgtgcagcacgttctttaacactgaaagtaccaaaaccaactaaagttactgtgtcaccttttttaagtgcttcagtaattgacgcaattgtcgcatcgagtgccttgcctgcatcagtcttagatactccccctttttcagcaattgcatcgattaattctgatttattcatgaataaaacatcctcttaatatcgtttgtttaaggtccaaggctatagtttaaaaggccatgacgcctttatagcaatgctttgggggaaaacgcaatactagagcagagcttttagcaaaaataaatgctaaaaaactgttatatatttgctaaatccctacatttttttacttttcattcaattttgccttcaatttctgattttcttcaattaaagcatctacctttatatgcagttgaactaggagttgttcaatgtgctgtaaatccttcggagtgaccaagccaattctatttaaagagtggtttacactcgtatctaaaattttctcgaccttgtcttttgtatcagaaaccgactcttttgctttttcggttactttaccaacagttgtatctgctaaatcacctgttttggattctaactcttcccctactttgactaatgagtcaaatagtttgttcccttcttcttcggcacgtgaaaaagcacccaaacctgccaaccagatttgtttagtatactttctaaaatctaatgcagattttctagaactttttgattttgatttatttttttctccttgctcttctgcttgtgtttctatgtttgcattatccattgatctaagctcctgatcggatgagagagacgaagtgttatttaaccacaaaatattcttataataacaaagtcaagacttgatacatttatgaaactgttctacaaaacaatcatgtcatgtaaatatatttaacaggacattgtgttaagtttgagataggatgtctcattctctcaattaatctctaatatttaaggataaacttttatgagtgaaacgcaacaaagacaaaaacatccacgtctgttgctgaatattgttctaattattttagaaacttttttctcatttattctcacccacgatggtgttcttcgcttgcaagcgaaaaagtttatcgccaataaaataacaatccgtattaatagctatttgccatttttcgacttctatgtgcagtttacggaaaaaggattgctatttgatattcactcatatgaccgtcggattgatttagaaattaatagtactctcgttgaccttatcaaaatttttgttttttcaaatcaacgtagcctgaataacatgcgaattgatggggatgcagagactaaaaaagaacttatcgatttaatttcgcatctcactttacctaagcttctagcagactggaaacagtggttcaacgcaccagatgatgaagccgaagccctagcctctcgcaaaaaaattgctccattacttgaaaaaatcgaccaacaacgctcagaaataaattcgttgcatgtcgaaattaaacagtatcaaaaccgaattgcacgtttacaacagcgccaacggaacattaacttgtgctttggtataattagcctaatatttattgtttatttcatatataatttgtgggtagcttaacttattttttctaacttgatcctgcacctgaattaaaaataaaaaaacttgactattttagtcgggattcataaaatcctattatctagtcttaacatgtgtatcgaatcatgcgccttacaactcgcggtcgctacgcagtgactgctctacttgatttagctttgcagccaactgaacaaacgatcacgctcgccgaaattgccgcacgtcaatctatttcagttgcttatttagagcagttgttcgcaaaacttaagcgtcatgggttagtttctagtgttcgcggtgcaaatggtggttatcatttggctcgaaacgctgatgaaattactgtgttagaaatcattgaagccgtaaatgaaaccgttgatgcaacgcgttgtgaccataaaggcaactgccaaaatggtgcaatgtgtcttactcacgatttatggcaagaactctctcatcatattgccgactatttagctaaaatcactcttgccaacctcattagccgagacaacgttcaaactgttgcattacgccaaaatgtaactggcacagattcagctcttttatcgggtacaggtatttgatatgaaacgtccaatttatcttgattacgcagcaaccactccagtagatccgcaagttgcagaacgtatgatggagtgtttaactttcgacggtacctttggtaatgctgcatctcgttcccacgcttatggctggcaggcagaagaaaaagttgaatatgcacgtgagcaagtcgcaaacttaattaaagctgacccacgtgaaatcgtttggacttctggtgcaactgaatcagacaaccttgctcttaaaggtgttgctcaattctatgcatctaaaggcaaacatatcattacaagtaaaattgaacataaagctgttctagatccttgccgtgaattggaagaacaaggttttgaaatcacttatttagagccagaaccacaaacaggtttaattactcctgaaatggttaaggctgcccttcgcccagatactattcttgtttctcttatgatggtaaacaatgaaattggtacagttacagatgtagcagcgatcggtgaattaacacgtgcaaataaaacgtttttccatgtagatgcagcacaagcagctggtaaagtcgatatcgacttatctacaatgaaaattgacctaatgagtttctctgctcataaaatttatggtccaaaaggtatcggcgcattatatgtacgtcgtagcccacgtgttcgtctaaaagcacaaattcatggcggtggacatgaacgtggtatgcgttctggtactttagcgactcaccaaattgttggtatgggtgaagcttttgaacttgcaggcaaaacaatgcatgcagaacaagaacgtattcgtaaacttcgtgacaaactttggaacggtttacaagaccttgaacaagtgttcttaaatggccacccaactcaaaacgttgctaactatttaaatgtcagcttcaactttgttgaaggtgaatctttaatgatgtcgcttaaagacgctgctgtatcaagtggttctgcttgtacttctgctactttagagccttcatatgttcttcgcgcattaggtttatctgatgagctagcacacagctcaattcgctttagttttggtaaatacacgactgaagaagatattgaccacgtgcttacaattaccaaagccgctgttgagaaattacgtgaactttctccgctttgggatatgtacaaagaaggtatcgatctttctacagttgaatgggcagaacactaattattgaaattagtgttttaaccctcatattaatattaggctgaccccgaggtttggagaagcgaaatggcttatagcgaaaaggtaattgatcattacgaaaatccacgtaatgttggtgttttagacaaaaactctgagaatgttggtacaggtatggtgggtgcacctgcatgtggcgacgtaatgcgtttacagattcaagtaaatgacaacggtgtaatcgaagaagcacgtttcaagacttatggttgcggttctgcaattgcatcaagttcacttgtaacagaatggttaaaaggcaagactcttgatgaagctcaagcaatcaaaaacattgatattgcaactgagctagctcttccgccagtaaaagttcactgttctgtattagctgaagatgcaattaaagctgcgattgaagattatcgtagtaaaaaatcaaaagcttaatttgttaccattataaacgttggagttttcatgattcatttaactgaaaatgctgcgtctcatattagcaattaccttaaaaaccgaggtaagggtgaaggcattcgcgttggtgtgaaaacttctggttgttctgggttggcttatgttctcgaatttgtagatgatatcgatgaacatgatcaaattttcgaacaattcggcgttaaggtttttgtagatcctaaaagcttagtttacttagacggcttagaaatggactatgttaaaaatggccttaatgaagggttcgaatttaacaatcctaataaaaagggtgaatgtggttgtggtgagtcattcactgtttaatcctctcctttcctttttcttattaaaacagtgccttttaacagcactgttttaatgtatttaattaatgtggacctcatttctaatgaatcattttgagttgttcaatttacctgtggcactcgatatcgatttggcaagcttgaaatcaaatttcttaagtttgcaacaacaatatcatccagataaagccgcagataaagatcaagcattgatcaaatcaagtgaaatcaatcaagcttttaaaacgctttctcaagttgatagccgcgctgcttatcttttagctcttaaaaagcaagatcatcatcttgatcaatctattagtgatttcgaatttctacaatccgctttagaacttcgtgaacaacttgatgaagcgacatcatctgaacatttacgtactttaagattagaagtacaacaatggattgatggtttagtccgtgaattcaaaattgattacagtgaagaagattgggcagaagcacgtgataccgtacgtaagttacgtttctttcaacgtgttttaaacgatattgataaagcagaagatcaactgttagatgatgaagacagttttgatttagacgacgatttttaattttgctttctctactttattttcaagggatttaactcatggcacttttgcaaattgctgaaccgggtcaatccagtgccccacaccaacatcgcattgcgattggtattgacctaggaacaacacactcattagttgcgacagtgttatcaggcaaacctaaagtactcaatgatgttcaaaatagaagattacttccttctatcgttcattatggggacaatacaactcattatggtgaagaagctaaaccgtttatcattgcagatccaaaaaatacaattgtttctgttaaacgatttatgggccgttcaaaggcagatattaaatttcaacacccttatgagttagtaggctcagaaaatgaaatgcctgcttttgaaacccgtgctggacgtaaaacaccagtagaaatctcagctgaaattttaaaacaattaaaagatcgcgctgaagacagcttacaaaatcctgttaatggagcagtaattaccgttcctgcatatttcgatgaagctcagcgtcaagcaactcgcgatgcagctcaacttgccggtttaaatgtattacgtttattaaatgagcctacagctgccgctgtagcttatggattagatcaagaaagtaatttagcgaccgaccgtaattatgtaatttatgacttgggtggcggtacttttgacgtatctatcttacgtttttcacaaggcgtatttgaagttttagcgactggcggtcacactgctttaggtggtgatgacttagaccgtctaatcgtaaaatgggctaaaaaacagcttaatattgatgtattaagcgatgaagattatgccgtatttattgtggcagcacgtcaagctaaagaacaattatcaactcaagattcagttgaattaaagttactcgaagcaactctcacactagatcgccctacatttgaaagcattattcaagtagcattagataaaacgattagtgtttgtaagcgtgtactgcgtgatgcaaaacttgagttaactgatatccaaaatgttgttttggtaggtggttctacgcgctcttatgctgttcaaaaagcagtacgggaagtttttgcccaagaacctctttgcacgatcaatccggatgaagtagtggcaattggcgcttctattacagccaaccagttaattggtaatagccaagatggctctcttcttttagatgtaactcctctttctcttggtctagagactatgggaggactcgttgagcgcctgatatctcgtaatacagctattcctgttgcacgtcgtcaagagttcaccacttatcaagatggtcaaactgctatgttaattcatgtagttcagggcgaacgtgatttagttgaacattgccgttcattaggtagatttgtacttcatggcattccaccaatgactgcaggccaagctcgtattgaagtcactttccaagttgatgcagatggcttactcaccgtttctgctcgtgaagcaacttctggcgtgcaagctcatatcgatatcaaaccatcttatggtttatctgaggcagatacggaacgcttattaattgaaggtttccaacatgccgaagaggacaaaaatcttcgtcatttaaaagaaactaaagttgaagcagaacgtgagcttgaggctcttgagcaagcattaaaagtagatgcggatttacttgatgaaaagcagcttgacgcactcaactctgctaaggaatcattaaaagctcagcttgaaggcagtgatattcaagcaattgagcacgcagttcaacaacttaaagtacatagtgatgcttttgcagcactacggatgaatcgacatattgaccatgccttaaaaggcacgaagctcgatgattggtcaaaatcaaattaaaaggtataggtgatcaatatgccacgtattaaagtacttcctcacgctcaattttgcccagaaggagcagaatttgaggttgaacaaaatgcaaatctttgccaaagtttgctcaacaaaggaatcaaaattgaacatgcttgtgatatgtcttgtgcatgtacaacttgtcatgtgatcgttcgtaaaggctttgatagcttagaagaaatgaatgatgttgaagccgatcttctagaccgtgcttgggggttggagcctgactcacgtctttcatgtcaggttaaagttgtagatgaagatcttgaaattgagattccgaaatacacaattaaccacgcttcggaaaatcattaataaataataaaaaaagctgcttaggcagcttttttatttatataatttatacctgatcttgttcttcatcgatatttataggcttaacttcatcctcaagtctaagctgagcaacaccttgagtattaaccaaagtttgttgaactttaatgcgctgaatcattttttcaagcacttcaaccaactcagggtattcgtagttttgtacttcttctaaatttaaaactaaatggaaacctttatattcataatcaaaccattgttgatgatctgatttatttcctgtgtatttttccatgacttgccatgtttttactgccccttgaataccctttaaataaattggggtcttaggcgcacatagaaaatcacttttgatcaattgataagtatcatcagaaatgagtatttcatcaatttcagcagcatactgtaaacgtgccgctaaatttacgtcacgacctacaatcgtataagccatacgatgggttgcaccataattccctacgtggcaataacctgtactaatacccatacggatatgtaaggctgaatatcccattttcttccatcgttcgcgcaacaacttcatttgctgacgcatagcaattgccatttctacacaggatttggcatcttgctcaaccccttgtgaattcggatctccaaaaaatatgagaatcgcatctcccataaatttatcgaccgtcgcttcatattgctttgcaatttcagtcatatgacttaaataatcgttaagcaagaaagctaagtcatcaggaattaaagtttctgatagttcggtgaacccctgaatatcagaaaagaatacggtcatttttttacgtttatattcgatttttgcttcagcttccccacgcataatcgactgccataattgtaatggagcatagcggcttaactgattagcaaaagcaatataacgtgtcatctggtcataataatgctgacgttgctgactaatttttttaacccagcggtgttggtaataatttccgatagtgataaacattaccaaaccaagtaaggtaattactgttaattcttggcttgtggcttcgaaatatggatgaaaaccaaataggaaaaatgtacttaaataaaaaataatcgccccaagcagactcgttaaacaaataactgcaaaggaaatacgactattaattgctgagtaaaataatgcaaaaagggcaataaatgttggaacgagattaaggtgcactcctgctagagtaacagccactacaatcgcatctattgcaaaaaaaacacttttttgagttttcttatcaaactggtactgcaaccagtgttctagtttagaactgacaaaaagtaaaaaagaaaaaaggaggaatatagatttgataattagtattcggtgaggtaaaggcatagatcactaaaattaatgacagaattgaatatcccatcaaacgatgaaaatatgcaaactgcttaggttcccgatctataaacctctctaattgcaccctatcctccacatttcaatgttgccacattgatatgtggcattacattgatttaatccatgcgccaatcaaaaggcatatcaccttggccacgtagagcaagcataagagtctgacgcatatgagctaaaacatcacttgtatatggcaccgctggtgtaccccatacaggtttcggccaagctacatcattttgatagcggacaacatgatgaaaatgcaattgaggcaccatattacctaaagctgctacattcattttatcagcacggaaaacgcgagataactggctagataaccagcttgattcacgtagaaactgttcttggtcagcttgactcaattcgtatagttccgtgattcctggtacgcgtggtactaaaatcaaccaaggaaattgcatatcattcattaaacgacatgttgaaagcgggaaatcgcctacaaaaaaagtatcttgagcaagttgtggatgcaaactaaacatatcttttataaatgacaataaacaataatggctaatactatcacatcagttttgatgtgaatattattagtagcccgtttgcttacaaataacaatgattttatgcacttattcatatctcaaggtataaatagtgcataaaatccgattacaacaaaacaaatgtcctaattagctagcactggttagaaaaataggtctcaggcatgtagttcactcatcaatttttgcaataaatcattgataaattgaattcgtttttcatactcttcaagctgcaccatcaccttcaaacgttgtccgccttccatacggtaataagtcggatttttttgcattaactgaataatactaatggcctgaactggcgtatctggtgaaaactcaatatttccaccttgagtattaatatcaattttcgtaatacctaaatgttctgctttcaaacggatttgatgcacgctaaataagtgcttaaccgactgcggtggaataccgaaacggtcaataagctccatacggatgttatctagtttttcctgtgtatcggtattactaatacgtttatagaataatagacgttgatgaacatcacccagataatcatctggaataagtgcaggaatatgtaagttaatttcggcagttaacgacaatggagcatcaaaattcggggttttaccctgttgaattgctttagtcgctttctcaagcatttccatatacaagctatatcctatcgcctgcattgagccactttgttgctcgcctaacaattcgcctgctccacgaatttccaaatcttccgtagcgagcataaagcctgcacctaatgtcgaagcacgttgaatcgcatcaaggcgtttttcggcatcaccttttaagtgtttaatcgaaggtactaataaatacgcgtatgcttggtgatgcgaacgacctacacggccacgtaactggtgtaattgcgctaaaccaagtttatccgcacgttcaatcaaaattgtattggcatttggaacatcgatacctgtctcaataatggttgagcacaccagcacattatattctttgtgatagaactgctgcataacttgctcaagttcgcgttcacgcatttgtccatgtgctaccgctacacgtgcttcgggtacaagcacacgaatattttcggcagctcgctcaatggtctctacttcattatgtaagaaataaacttgtccaccacgaagtaactcacgcaaaatcgcttccttgattgaagcatctgtatgctcttgcacaaaggtttttactgctaatcgacgggctggcggagtcgcaataatcgacaaatcacgcatacccgaaaaagccatattaagcgtacgaggaattggcgttgctgtaagtgtcaacatatcaacatcggcacgtaaagctttgatacgctccttatcacgcacaccaaagcgatgctcctcgtctacaaccattaagcctaaatctttaaactgaacattctcttgtagaagcttatgtgtacctaccacaatgtcgactttaccatttgccaagtcttcaatatttttcaaatgtgttttgtttgaaccaaaacgtgagagcacttcaatacgtactggccaatcagcaaaacggtctttaaaagactcataatgttgttgagctagtaaagtcgtaggaactaaaacagcaacctgtttgccattttgtactgcgacaaatgctgcacgcatggccacctcggttttcccaaaacccacatcaccacacaccaacctatccattggttttgcttgctgcatatcatagagcgtggcttcaattgcattagcctgatcaagggtttcttcatacgcaaaaccgcttgcaaattgcatatagagcgactgatccagttcaaaagcaaagccaggttttgactgacgacgtgcctgaatatgtaaaagctcagctgcaacgtcatgaatttgttctaatgctttacgcttagctttactccaagcatcagttccgattttatgtaacggtgctaaatccgggtcgccaccactataacggctaattagatgcaagttcgttactggaacatagacttttgcatcttcggcataatctagttgtaagaactcatagtcttgtccctcaatcgcgagtgtaattaagccagcataacgccccacaccatgatcgatatgtacaacaggagcaccaatgcttagctcagttaagcttcgaatcagaaactcttcggaaacttcctgttgacgcttgcgacgacgctgtacaactcggtgctcgtaaagctgattttctgaaataaccgttaattgatcagttaaaagtaagccacgatctagaggcgcattagtaatagcaattgcaaactgactaatttggaattgctcaaaattctctacattcggaatctcacctaaacttgaacgcaacgcatcttttaagctttcacgacgtcctgcactttccgcaaccaatagaacaggatgatttgcttcatcaatatatttttttacggcactaaatggtttttcttttttcggatcgactggcaacttgggtggttgttcagttttaagattaagtgcaccagctttttcttcaatagtttctgcgctcacaagcattcgtggaaactggtttagagcacttagcagatgatttggagaaataaatagctcttctggagcaagaataggttgatccatattatggcgtcggtcttcataacgacgcataacttctttccagaaactcgttaaatcagtatcaatatcattagttgtaattacaatgcaattctttggtaagtatgttgtaaacatactttgtgactgcatttgttctttattaaaaaatagcggtaaataaaattcaataccaggcgatgctataccatctaaaacgtcctgataaattggatttttcttaggattggcagtaggaaaaaactcagaataacggtctctaaaaactgaacgtccttcttttaaagggaattctttcgcgggtaaaaccgtaaaactttttagcgtggttgttgttctttgagtttctgggtcaaagaattttaaagaatcaatttcatcgtcaaataaatctatgcggattggagattcttgcccagatgcaaaaatatccataatactgccgcgtacagcaaactcaccatggtcataaactgtatctactaagtggtagcccgcctgaactaaccttaatttttgttgttctaaatcaaatttttgacccacttttatatcaaagtgttctcccaatacccatgagtaaggtgcaacccgttgagccaaggtacttgctgaaatcagtaatacgccttgctgaggcatattagataaaatagcaagacgttctgacacaatatcttgatggggagataaacggtcataaggcaaaatttcccaatccggaaaaattgtcggcttaactccataaaactcaagttcactttctaattgagcaacatgttggttgtttctagcaactaataccaataaagaagaatgttgagtggcaatttctttaagcaataaagctgctgatgaacctaataatgaccccacccaacgcttttcaccggccttgagctgttgcaaattcaattgagagatttcttgttgaaacatgtatatggcttttatgagctaaaaagatatgaggttaatagtagcatgatgtttttagtgaattgagttatttttctgcaatcaagctactactttgtgatacttttttatagttcttaaacaatcatttgaagttatttgtctcgtaaaaacatcacataatattggtttaatacctgtatgattgctttaagctcaagtaacttttcttgtgtattacctaacctttccacatatcgttgcgttgcaatctctaaatcaatcttttcattaatttgtggtgtaatttgaaatagcttaggtaagttatcaaaattctgtaatttacgatttgaaaaatattcaaggtgctctgaccacttttcattaatcacgacatttttaataactggaccacgctctgaatcaaaactgagctgattctcttgtaaataaatttgttctggtgtctctttcgaaccttgaaaaagttgggttaattttttaaacatctcatcacatcatattaatttcaatttatatagtagaggtaatctactcacctctaccatctaagtttattttttaatgcctactcatcacccaagccatctagaaaatctactgtcggtacgaaaaatagagtgcctgtttgggcagtactaaagtcaagtaatcgatcaagattaccttgctcatttcctaagaacatattttcaagcatttgacgtgtcgtactaaatttacgtgagtaaccaataaaaaaagtaccatattcatttttggatggattcgaaaaaggcatatttgcacgcataatttttagttcattgccttctgcatcatgcgctttacttactacattatgtgctgttaaaggtttctcctcatcatcaagctcaatatcgttgaactttttacgcccgataactttttcttgttcatcatcacttaatgcacgccatttttccatatcatgggtatatttttggataaatgcataacttcccccaataaagtcaggatcttcgttacccactaatgcccattgtgcagcaattacaggttcaggattttctgttccatctacaaagccaataatcgcacgcccatcgaaatatcgaaaaccatgcacttcatcaattgggtaagttactttacctaactgttcattgatgatacttcctaactcataacataaagcttgtcgatcagcacgaatatgaaagaataaatccccgggtgttgaaacggctgtgtattttgggcctttgatttcttgaaatgtttctaattcttgaggctttgcttgctgtggaaataaaatatcccacgcgtttgagctaaaacctaatatggcattaaatttagtttcaggataacggttagacaaacttctggttaacgctgagaatttaccagcaaaatcttttactttttctacaacagaatcaccttgagctaatcctaatacaataaataaagcattttctccaggatgactcgttacaggctgaattctcatacattccataaaacaggccttattttggtaatttaaggtagtaatttagcatattcatgtttttatcgtatgatttcttattgttgtcgcttcttaaaagagactgagttatctcaatctctagcgctctagcgctctagcgtgtttttctcatttatattttaactgccatattgtttttttaggtactttacaatttccgcagattcaaacattttaacacctgtatttgggtccactaaataaggcacttgcattttaccttgcatgaccggcaacaatttttctcgctttccctcttttaaaggttcatatttgcccggttttaaccgaagaatcgcaggccccatatcttgccatctttctttggcaacactatgtaaaatgtaaggtagctcaagctcacttaatacacttcttactactcttgaatacggacttgcttcaaagctccatagttcaagtttatgctcaggcgcagctctatttactatttttttattaatccagaccccacgagcaccatttaataatgttccggcaaacgccagatatggcatttttggataatttgaaaacttatcaggagtttggcctgtcttaccatagtatttaaataaatgatgaataatatcttgtgattcgtataatttgtcacctgtattttcatcaataaaaaaaggaaactgtaatttaccgccaatttctttaactatggagcgatattttaatccacctttcgggcatggataaatttcgacatccaaatttaaaagtgtaatcacttcacgaacgcggcgacaaaatggtgaaccctcaaattcataaagtttaagagctctaacaggctgtttaggaaatgctgtacctgtaacacctctaccaccttcagcaattgcagacgctaatgcttgcagtactttaatttgatgattcaccattatgcattcctttaattgtggagctagactagtttttctttagcaatcacaattccattattatctgcatagataaaatcaccagattgaattgtgactccaccaaaatacaaaggaatatctacttcaccaatgcccttacggttacttttttgcggaattgcagccaatgcatgtacacctaaatctaaggttgcaagtgcatcaacatcacgtacacagccataaataaccacaccattccagttatttttaacagctgattccgcaatcatatctcccataagtgcacagcgcattgaagcaccaccatccacaaccaataccttccctgtaccatctgtagccaataactcttttacacgcgagttatcttcaaaacactttacagtcacaacttgtccgccaaaagtttgacgtgcgccataacttttaaagaacttaccgtccattgatggtgtgaccacttgcaaatctttttccggattgtcatctaataaatcacatgtcacaaatggtactgtcgacacttttattctcccttatcgagtttgttgtatgctgagattatcatatcgtttaaaagcttcaatttgcgttaatgccgctacgaccatggtatgagccaattgctctgccgtgactggtttatatttgaaaggcttattccatttattttcaataagtttaaatagactttgtcctaaatcttcaataaaacgcacatcgctacgcttaccaatcaatagagaaggtctaaaaatagataatttttcgattcctaaactttgaatataatcttctaactctccttttactttattgtagaaaattggcgaattagcatttgccccaagtgcactaacaattaaaaaatgaatatgtttatcttggattaagtctgcaaagtgggcatttatctcataatcaactgcataaaagcgttgttttgagcccgctatttttaaagttgtacctaagcaactaaatgcatgagtatgaccattcacatcttcatcattgagcaataaaaaatcgtctataacgagctgagtaactttcttatatgtattaagtagttgtgattcttttcttactacaacggtaatggcctcaaattctggtgtttgctcaagttgttcaacaagcgctaaaccaacgagtcctgtagcacctactacaattgcttttttcgtacttatagtcattttttatccaaccctctttaagtttgtatcaaatttaaccttttcttacggttttagcagcccctaaaaccgcttaaaatgctctcaaggcttgacttcacggtattgattcatcacaatatggcacttgtttacgggctggtgatggttacaccagtttactggattgaccacagcccgcccagaccaacttattttcaaggagtgcaagagtggcaaactctgctcaagctaaaaaacgtgcgcgccaaaacgttaaagcgcgtaaacacaacgcaagcttgcgttctatggttcgtacttacatcaaacgtactttaagtgcaatcgctggtggtgattatgctgttgctacagaagcttacaaaaaagctgttcctgtaatcgaccgcatggctgataaaggcatcatccacaaaaataaagctgctcgtcataagagccgtttaaatgctcaagttaaagctttagctaactaattgaagcatgtaaaaaaagcccaacagggctttttttattgtctatgtttttgtgtttactgtactttatgaaactcagaaacatctaactcgtaagttttgcctctccaaatccactttaatttacaatttggaaattcatcaccttcaaaccatacaaacagcccttccatcatggcaggccaatctgctttttgtatctgattattacccgaaattacggcaactatggcagcaataattgtgtcatgactaacagctaaactcagcccactttttgttttaggatgagtctgataaataagttccaacacatctaaaaccccagtaatgggatgtttcatacccggcaaggcattgttcacaaaactattaataaaaccaagtgccccttgtttacggaaataaggcgccgcctgttgaatatccagtacaaagctaccaggttcaaccaacaaaccttgttcaactatttcaattgtatgtgtattcggctcagggctcactccatctgctccttcaatcataagtgcagcagtgtctacacaacgttgaatcgggctagaaatgcaatgttgaattacacgatccgtgtttttaattaaatagctaccccattcctgagcaagctcacgtccttgcggtgtaagctgaagatcatatcctgccaagccttgcccatctaccaactctcttaaggagtgacgtgtaaaaagggttacaggggtcgaagcatcaggcaataaatcaattgcttcaaacatgcttttaggcaataaatcgagtgccatttttatcttgtcatcttttctcaatattttgccactatagcatgtctacaataactctcaatccaaaacacctgattgagctaaagcttcaaatgctatttttttgctttcctgatcacgaaatgcgataaagcccccatttaatacggtatcacgctggttatattcaaagggcttacctgttagagtgagtaaacctccacctatactttctaataatccttgacctgagctggtatcccattctgatgtcggatgaaatctaggataaatatcgatctctccttctaacatcatacaaaacttataagcgctgcctgcttcacgtcgaattacggtacgaatcttttcaataggttcaatgaatttctgatatttcggatttttactactatgacttaaaccaatttgtacaggagcttgttttgaataaggtgttttttgatattgataccattgttgttggctaaagctatatttaaaaggtaaatcttttaaataacctaaataaacaacttgctcacatggcacaacaatcaccgaaaaaatcgtttcacgcccttcaatcaaactcaagtttatcgtgaactcatctcgctcatgtataaactctttcgtaccatcaagtggatctagcatccagcaagaagaccaagcatggcgagcgctatagtcactttcttccgataaaaccggtaactcaggtgtaatttctgcaagatgctttaataaaaaacgatttacctttaaatctgcttgcgttacaggtgaatcatcatgtttttcttgaatcgtaaattcatatccagccgaataattttgatattcttgtaataagatttggctagcttcttccaagattggtagtaactgttcaattaaagcatcattggggcgagttgttgttataaacataaataagctctatttactttccttttcattataagtgaattatgacaaattcaatattcaccaacagtctagtatccttacaaaaagacttaactttttattaagaacactattattccttcaacagctgaatctttatattttaacttgattagacgcttattactcaagagaaagctcagttaatttttgtatagaaaatatgctataacttatgaaaaataaacaacttaaagtaaattcaaccatttctttttcacgcatttcttgctatgttcaatagcacaataacaaaatggaagactaaatatgatgctatatggatatcacttctcaacaattgaaaataactgggaagacttaactccattaaatgagtttttacaaacatttgcagatgatgatggtgatgtctcccaaagagataaagaatcacttaaagaaattattgctaaatccgatacagctttggccttagctaaagaaatgggttgggatggcagttatacaggctgtccttatttattttggttaccaagtaaaaatacgcaatcttttgaatatggatttgtttttaaacaaacctcagataactcaacttttgtaatctcaccgattgaattggcttatctggcgcaagatgagcaggtacaaactttaagtaagaatattgattaaatatcaaaggttattgacttaaaaattaagccaataacctaactccaatgcagttattcaaacatacttaattgaggtgtaggttttataatcttctctttaggaacatgtaaacattcaaattcctcaacaggaaaaccttcaataaaactggaaatatctggtgtctctaaacttaaccattcatctaagcggtcatgtggaatcacaatgactgatcttttaacatcacccggttcatggaagtctttcatcatggggtgatcaatcgcatccatggttaacatactcgcagaacggacaatcgtttcattcattttgcaaatttcatagattgctgcgataaaaaaagcctgcccatctttacggcgtacgccccaccgctcaggtttatcatttatatatttactctcataaaactccgtcacgggtattacaccgaacttacatttaagagcagcttcttgaaaactcggtttttggaaaattgtttcatgacgagcgttataagtatgttttgctatgttcgtatcttctgcccatttaggaaccaaaccgaacatgacttcacgccactcaaaaccttgcggtgatttgaataacaatggcattgtcccacccggataaacctcatcggcatagctaaagccgaccacaggcaactgaagttgctgcaattgggcaagagttaaaggcttaaagttggcacacatagcaggaataaaatactgtacttttacatctcttattttataagtatttattctataaaccaaataaaaaggcacttaaaagtgcctttaacgacataactttacgcttacgaaacgtgctgaatcccttgtggaatagcctgcaatagtcgtttggtgtagtcatgttgcggatgtgcatagagctcatccgagttggcgatttcaacaacttcaccatgattcatgaccataacctgatcggagatatatttcacaaccgacaagtcatgtgaaataaaaatataactaagcccaaactcatcttgtaagtcttgtaataaattaagtacttgtgcctgaactgaaacatctaacgccgaaacagattcatcacaaattagaatttcaggctttagcgttaagcagcgcgcaatcgcaatacgttggcgttgaccgcccgagaactcatgtggatatcgataataagcttgttcaggcagattcactctctcaagtaaaccaagcgcaatttgcttacgttccgcgtcatctttaccaattccatgaatttgcataggttccaataagatctgcccaatcgtaaagcggggatttagcgaagcatatggattttgaaagatgatttggatcttcctttgatatttggcaaactctttttcagttaaagaaagaatatctttaccttcaattaaagcctgtccccccgatgcttgatgtaagcgcatgagcaataacccgacagtcgttttaccggagcccgactctcctaccaaaccaagcgtttttcctttagccaatttaaaagaaacgccttttactgcctgaaattcttctttgccaaacaatcctttacgactataaaaactttttttcagatcttttacttctaaaataatgtgctcatcgccatttaaaccacgtttacgttcaggaatttctgaaacatcaaagctttgctcaaccaatatattgttttcttgtcgcataaaatcactggttacaggcaaacgataaggtctttgtgacatttgaggacgacagtaaagtaaggctcgggtatatacatctttaggctgttccaaaacttgttcagcggtaccttgctctctaatttcaccatgtcgcatcacaatcacttgatctgcaatttcaccaaccaaagccaaatcgtgagtaataaaaagcatcgacatttgacggcgctgacgtagtgattcaagtaaatcaataatttgcttttgaatggtaacatcaagcgctgtagtcggttcatcggcaatcagtagcttaggttcacaagcaattgccattgcaatcatgacacgttgctgctgaccacccgaaagctggttaggataagcatcaattttcgtttctggtgaaggtataccgacctctttaagcaactctaaaacacgttgccgcgcctgttttcggctcatacccatatgtaaacacaacacttctgcaatttgattgccaaccgtaaaaaccggatttaatgatgacatcggttcctgaaaaatcatggcaatatctttgccacagatttttcgcatctctgtacgcgataagccaagcaagtctttaccttcaaaaataatcttacttttctcatcaatcttgctttgacctacgggaagtaaacccatagttgctaaagaagtgacagacttaccactacccgattcaccaaccaaagctacagtcgtattggtcggaatatcaaaggaaattcctttcacagtttcgatatattgtttatcttcacctttaaagcttacacgtaagttttcaatgtggagtaatggggtctttttttcttgttctgacatttggatttcctcttattttagtttcgggtctaatgcatcgcgtagcgcatcagtaaacattgaaaatgccgtaaccaaaaccgccattgcgacagaggctgcgacaagctgccaccacttacctaaaagaagttcactttgtgcttcatttaacatactgccccaagacactacacctactggcacaccgaaccctaagaaactcaaaatcacttccgatttaataaaagaaaccaccaaaatagacatttggaccaatgcaatatggctgacgttaggaaaaatatgaataaacatacggcgaaaatgcccgacaccaatggctttagctgcaagtacatattcgcgtgccgtatgtttcatatattcagcacgaattaaccgatagacacctgtccagcctgttaagcctaaaatcagaacaatagataaaatacccttttgttgtagtacagcagcaatcgcaagaactaataataaatatggaatggaagtaaaaatattataaaaccagttgagaatatcatcgacccaaccaccaaaataacctgaaattgctcctaaaagcgttcctaatgtgactgccagtaaggcagaaacaagccctacaataattgaagtttcagcgcctttaatggtttttttaaggacatcttgtccccatttgtcagcaccaaaaattagggtactttttagttcactttgctgatcaagtaaatgtccaccgagttgctgatcaattgctttcatatcatcagctaatggatcaactacaccataataatcaattgcacttccagagctcttttcttgtttgatttcggccttaagttggtgaattacatcttttaagggatcgactggattttccggtaattcctcatctacagcggctgtacttttcaaagcttccgttgtcttatctgcacctataaatgtaggaggcgcataactgacagcaacttctttattccaatcagatgcaatcacacccgttagagatagtattaatacgatcaaatagaacaacacaacaatgagcgatgccattgcaattttatcggcccggagacgacgcatggcaagtcgccatagccccgctgaagcaggagcggtctgggtttctaactttctttttgataaaacactcagcataacccacctacttcaactgtacacgtggatcaaccactttgtagaccaagtccgcaatcaaattaaaaatcatggttgcagctgcaatatatacagtaatggctttgatgacaggaaaatcactacgctctacagcaataatcacttcacgaccaataccgggaataccaaaaaagcgttcaattaaaaatgcacctatcaataatgccggtaaatttgacatcacatcagtaataatcggaattgaggcattacgtagaacatgcacacttaaaattcggctttcccctacacctttagcacgtgcggttctcacataatcctgatttacttcatcaagcacaaagctacgatataaacgtaaagtaggtgcaatactcaccaccagcatgattagaattggtagtaaggaaaacttaaataaattttcggtaaaactatcgctccatccctgtactggaaaccagctcagttgataagccagaacatattgaaaaacaataatgtaaaccaaaatactaatcgacatcccgatggtacataacatcatgaccatacgatcagttagagagccacgtaccgccgctacagccaatgctaaaataattgaaataactgtttgtaaaatggtgagtggaattaaaagtgtgagcgacggtcctaatcgggttaagataatttgtgaaacggattcacctgtgctccaacttgcgccatagtcaaaagtaagaatttgcttaataaaaatccaaagttgaacataataaggttgatcaacacctaactgtttacggatattttcaatctgctcagggttagacatcttacctgccaaaatataggcaggatctccaccgacccaattaaataagataaaaataagcagcactactcccaacatggtcggaatcatctgccataaacgccgaataacatatgccagcatagtgataattccttatttaacccgttgtccggtaatttcgttaaagaatgctttattgtcaggatcacgaccaaggaaatctttaaccaattcagctgccggtttttggctaccctgcgataaaatcgtctgacgataacgttgtcccacttgtgggttgttcaggttgtcaccataagcagaaagcatgtctagcgctaaaacctcagaccacatataaccgtaataacctgcctgataaccacccattaaatgcccgaattgcccagggaattcagttgttggcacatatcctaaggctgtagcagcttccattttttgccaagtttctaaaggttttacttttaaggcatctgccgtatgaagtgccatgtcatactgtgcataaagcgtctgacgtgcataacgcaagccacggccatagttatgtactgcttttaaacgggcaattaactcatcgtcaacacgtggacaagctggatcgcaataatcggccactttagataaggtttctttacggcgtgcccactcttcatacatttgagaaggtgcttctacaaaatcacgctcgacagaagttccggactgacttgcatagcgtgtgtttgataagatgccatgtaaagcatgaccgaactcatgtacaaaagtttcaagctcatcactatttaaacctttacggttaaagttggtcaccaatactgaaatcggtaatcggttggttaaagtgctgccaccatatactccccaaactgctgcatggccatatttcccttcacgggggaatttatccatatataagccaccaaggagttttcctgtctttttatcaactacatcgtaatattcaacttcatcctgccatgctttaactttgacaggtttaaaatcaataccgtaaagatcagatgaaatagcaaataaccatttttgtgcggctaaagtcggaaaataatcacgaagcttttcctgatcaatttgatatttactcttacgaagtttttcgctccagtaagcttcactccaacgcgttatctcggttttgtctaacggcgtctttaaggtttgtgctttaaatgcacgaagctcttctacttctttacgttcaagtggtgctaccgttttttgtacttctgccaaaaacttgtttacagtctctggtgtttttgccattcggtcttttaaagcccaatctgcataactcgcttttccaaataactgtgcaagttcataacgtaaatctattgcctgtttgagtagttttaaattttgtttagtcccacgtcgcgtaaaagcgatttgatatctttttcgggcatcatcattatccgctagctccataaatggacgatattccggatactcaaaacctaatagataatttcctttcgtatttttctttaaccccgaaatataactttccggtaagcctttcatctcttcaggagtaaattcaagtttttccgggttatcacgaatattacggttatattcttgttcaagtttagtcaactcatccagaatagccttcattcttgcgcgttttgctggttctaactgaacccctgtgtcttcaaattgatccagaatatcttgacggtatttctggtcaatcggatcatttgcttttgtatttttaattacgttatacagttttgaattttggaatatatccgtatgaaactgattaattttgatttcgcagtcttctgctgccttacgtaatttcgcatctgggtctacattactatatagacctatgggccccgaaaaatcttcaagatgagcaaaaattttatcccacttggctaatatgggagcagcggcagcatcgtttttaacaggcgttttttcaaaactagaaatctcttgctgaattttttttaaattagaatcacaccatgctgggagttgctctgctttgagtaatggtaatgtcgcacgcgtcgcttcagccgatgcaaattgacttatacctatggtcaacatacataatgtagtcattttcagtgtattatttttcatcgtatctccaatttttttcatttaatgattagatttcgtatttgtatcaatatcgaagtacatccattcagcatgtaaaatcggatgcttcttatatccaataattcgtggttgggccaacatattgcgatagcgtgcataagacatttgcacaggcatataaacctctaacaagcgcgtcatttttcgatataacgcatctctttctgggcctggcttcacttgttgagactggcggtacaactcatcaaactctggtatcgaaccacaagaccagttagtcatatgagtatttgggccataaaaattctgcataaaattatccccatctggataatcagctatccatgcagaagaaccaaacattccctcacattgtttctgtgatcgaagtaagtctgaaaaaagcattggcttatacaccatgcgaatatgtaggctatcgaagtttttcttccaaagttcagcactttgttggccaatactgtcattgcgcgctttatattcgaccacgagcggcttgccgtttggttgtgtacgccaaccagaagcatcttttttgtagtgatatcgatccaacagcagattggctgcttttactgaatatggtgtactgcttctatactgtgggtcatatcccactacaccaggtggaactgggaaatgaagacgttctgcatcactattccttaccaatttaatctcttgatctattgaacgggacatcgcaatagcacggcgtaaggcaattttttctttactcattcctccaacaacgggatctttgagattccaatagatataactaatttctggatcaacaatacgagataattgcacgccttcttttgcaagctcgggtcttaatttaccgtctttaatcgcttttgaaactaattgcccttcaagctgaatgatatctacctcaccacgctggaatgctaaccatcgtgactggttttcttccatgacttgaatatcaattgtgccgatttgaggcatttgtttacctttaaggcgctttacaattgcttcatccccggggctactggcattaaagttccaggtaaaacctcgatattcaggatttgcttttaaaacaatacgtgaggcaggtatccacttactgagcatataaggtccggttcctaccggatgccccataacaaaaccagctttatctttatatttctcgatgacttcgcgtgccaccgcacctgtcggatcatgggccagtaataaaggaaagttatagtctggttttactaaccgaatcaccaaagtgtacttatcaggtgtttgtaaaccacttacattttgatcgtaattaaattttccggatttattggctgctttgactaaagcattcataccttcaattttatcttccaataaccaactattgggtgagcgtaaatttgggtccaataaccgcttaaaagaatatgcataatcgtaagctgttaactccctaggtttacctttaaacgctgggtcgggcgtaaagtaaatacccttcttaatgtgaatggtataagtcagaccatctgcactcacttctggcatagccgtagccacgtgtgggattaattttgctggtcttgccaaatagtcataggtatataaagtttcaaatatagatgtgagtacatgcgctgaatataagtcatgtacataagctgggtcgaagcctgtttcagctgttgggaatacataacgcaaaactttatttggatcggctgggcttttcgcaaaaatagatatagaacccgttaaagccattccggcaaagaataggccgacactacagtgcttaagcttttgttttaaattttcggtcatgatgatctttatctaaaattattttttaatagaggtaatatcaagatattgccagtttgtattcatcattgggtgagctttaaacccctgaacttgaggctgtatcaaccaattacgaattcgtgttacatgaataatccaaggattatcagcttctatctgacggttaagtttttcgtaatatgggagccgttgttgaggtggtaaatgaatggcctgagtataaagagcatcatatgttttagactgataacaagcatggtttccctgcccagcatttggtccatataataattgtgcaaaattatctccttcaggatagtcagcaatccatgcaccgctccagatcatatatttacattgagtagcggcttttaagttatctgcaaagttacttaccttaaagtcagctcgaatgccaatcgcatctaaattttttttccagagttctgaatgaataaccgatgctgagctattttctgtattgatttttaaaattaaaggtttgccatttggtaaggtccgatagccatcagccgcttttttataaccataataatcaagtagtttatttgctaacagcggattatatcctacgctacttttatatttagggttatatccgtttacaccttcaggtataaacatttgtgatctaacagcctgacttttataagcttgttgtatgctttctttttgattgtatgacagagtaattgctctacgaagcgctattttttctgggctaaaaccaccgatcactggatcccgcatattcatcatagtataggtaatctcaggatccttatttggatagtgcttaattcctctcttcttaaaagaagctttaagctgatttccatctaaagcttgaggaacagcattcgctgtgagtttatcaaagtctagttgtccagactgaaaagctaaccatcgtgactgctcttcttcaataatactgaccaccaccttgccaacttgtggcattttctttccagacatttccttaacaagttggttatcccaaggtgttcctgttgacttaaaattccagacaaaaccacgataatcaggattagcaactaactcgaccttacttctcggtacatatttacttaacatataaggaccagtacctacgggatgcataccaatacggtcaccgtaatagtcaacaacctctttagcaacagcaccaaaagtaatataggcaagaatataaggaaaattaaagtcttggcgagtcaaagtaaattgtagagtatatcgatcaagagctttaactccagcaatcggagcagcataatcaaattttccagttttctttgcttgagctacaaccgtatcggcaccttgtaacttaccatcaataaaagaaacagaaggcgctctatttttagggtctaaaatacgtttaattgtatagacgtagtcttcagccactaactcacggcgtttacctttaaaagctggatcattggtaaaatagatacccggcttaattttaaatatataaactttaccgtcttgttccactttgggcaggctttctacagtattgggaactaactgtaatggacgtgctaaatagtcatatttgagtaaaggctcaaaaattgcctcagcaatattagcgctatagaaattggtggttttaaccatatcgaagccatcatctggggcctcataggcaacatgcaaaattttgtttggttgcgctgtcgtaattgcgtaagcacaaggaactgatgtaatagccagacttaaaatggcgagcttaaaaaattttaatttcaagttcatacccacgtaattagtttttttaaaagatattatccttttgagtaacatctaaatctgcataagaaaagttctttttcaacagataggcctatttaggatttaaaatttgctttcctttatgctctttcgatttgatcaaatggaaaaataaactcaaatacctagtgttttgtaaccattgaatataaagcgaatttcatgccatttattaatatccatcttaaaatatttaaaaatattaaaaattcatatttttattagatacttaaaaacgtttgaactatataaataaaagtaactttctgccaaatattatattcatataagttaatcatataacatcttaaatgcacaaataaaatacattaaaaattaattatgatccacattagatcaagcctaacttacagatacttttaaaacaatctattgattaataataaaaatataatttaaccatgtagtgataaatattataacattacatattaaaaggctctaaaacgatacatttttatttaataagcatgtgaagagtccagtaatgtatattttttatacaaataaatttgaaacttttcgccaacatcaaaaaattttccaaatggaaaatttatttttatatcaaaaaagctaaagcatcatactcaagcataataaaatcaatatttatcaatattttgcataaactaaaaaaagaaaaatatatagttggcacttgctttgcttaaaaactttccagcaatatcgctaacgacaacaaaaagggatcaagtccacgatgaaaaaaaaatacaatgttcgatctcaggcaacccccaagattggcaaaacaattcttaaattaagcacccttagtttaagcatgatgtgtcttaccatggcacaagcagcagaaacggaacaatcaagtaccgatgaaaaaccaacaaaagtcgtaaaagttgccgttacaggttcttcaattaaaggggttgcggcacaaagtgcttcgccaattaccgtggtgaaagttgatgaaatcttaaaacaaggggtaacaacaactgaagaggctttggcaaagatcagcgcaaaccagtctaattttgttactgccagcaacgtaggtacaagtaaaacagctggctcggcagcaaaccttagagccttgggtgccaataagacacttgttttacttaatggccgtcgattagctgcaaatgcatatgacagtggcgttaccaacttaaatattattccactcgcaatgttagaccgtattgaggttttacgagatggcgcctcttccatttatggtaccgatgcaattggcggggtaattaacttcattactaaaaagcagtttacaggacttaatctgactgccggctatcaaaaaccagaacaaaaaggcggcgagcagcaagactacagcatttttgggggttttggtgatttagacgaaaatggctataacgtttttggtgttgtggactatcgcaaaggcgatgatgtcatggccaaagaccgtaaagttagtcggcgtggaggaatattacccgaattaggtgtcaatagaaccagtagtggttcattccctgccaatgtcccaggtttaggtaacccttacgcatccactggttgtggtaataatcctcttaatagtaacgatgatggaacttgtcgatacaacagccaagccgtgattggaattgttcctaaaacagaagacatctcagctatgggccgagcaacttttaaattaaatgataattttaacgcgattgcagaatatttatatgcaagaagtgaagtcactacttcagttgcaccagatgttttttttgatctgacgcttgaccctagtagtaaatattatccaggtaaaggtatcactccagctttagctggcgctacgggaactatccctctatatctacgttcacaatcgggtaatcgtgtaagtaatagtattaaccaatcacatagattatttgcgggtatcgagggtgaaactcatggttgggatattaactccggggttacctatgctcatagtagtgcatcggatgctatcgtaagtggctatttaaattttgataaaacacaagaagctttaaacaatggtattttaaacccattcggaccacaaaaccctgaagatgccaatgtatggaatgagttaggagttgaaggtaaatacttaaaagctaacctagatacaactactgtcgatttcacggcaagccgacctatatttaaattaccagctggagacgtggcttttgcagttggagcaagctatcgttatgaagattggacttcaaaagtcgttactgatgttgcccgagtggcacctagcacaggtgttgatcctgatgagccagtaaatactggcgatcgtaatattaaatcggtatttaccgaatttcatatcccccttcataaaactttagaagctcaaatcgctgctcgttatgatgactacaacgattttggtgatacttttaatccgaaatttgcacttcgttgggaacctattaaacagttaatgttccgtacaacttatagcacaggtttcagagcaccaacactttgggaagttaatggtgcaaattcgataactaatacaggtgcatcatataatgatcctgtgctttgccctggtggagttgtacaatcaggaggaaaaaaagaacgcgattgtaatatgcaattcgacagacaaaatggaggtaataaaactctagatccagaagaatcaaaatcttttaccgctggcttagtgtttgaaccaattaaaaatttagcttttactctcgattacttcaatatcgaagtcgacaagcaaattgctacactttcagaaactgctatttttaatgacccagtgaaatatgcagacaaatttgtacgtaatcctgatggctcattagattatattattacaacccaacaaaatttaggtggaattaaaacttctggttttgacgtcggcttaagttgggtttctccaatgactgctacaggtcgattcggtttcaatattgatggtacatatataacagattacaaatatcaagccgaaccaaatggagaatggataggtgttgcagggtcatatagcggcttagactatcaatccattattctgcggtggaaacatactgcaaacctaaattggaattatgaaaactgggctttaaacctacaacaaaacttctctcgtgggtaccaagatcaaaactctaacggccaaaaccatagagtcagcgactatacaacatacaatatttcaggcacttataaaggctttaaaaatctagaagttacagcaggtattaagaatatctttgatgaagaccctcctgcttctaatgtaattgataacttccaaatggggtatgacccacgttacgcagatcctttaggacgtacttactttgtacgaggtacatataagttctaaatggtagttctgcaaatgtagctcacaacagttagtttgcagaacaaatactcattcttagccaaacagtcattttaaaaattgtttgtctacagtttcaggagtaactatgggcatgacttttacagacatagaaaataaatctgccaaacgcctaattggtattgctgcagtcatttttctgcatcttcttgttgcctatattctgatgtcaggtttagcaaacaatattcaaaaaccagcagaaaaacctgtggaattacaaattattcaggatattaagccacctcctccaccaaagccggaagagccgaaaccaaaggaaaaaccacctgagccaccaaaaatggtcgaaaaagttgccaaggttcctgagccaccaaaagaagtagagaaagtagcaacaccagtacaaaaaacgacgccagtagctcaaccgactaaagtcgctactccggctcctgctgcacctagtactccttctccgagccctgttgctgcacccgctccagtggcggcggctgcaccagcacctaaacccgctggtgtaactcgtggtgtttcagaaggctctgcgggctgtgaaaaaccggaatatccacgcgaagcactcatgaacgaagagcaaggaacggtgcgtatacgtgttttggttgatacatccggcaaagtcattgatgccaaagtaaaaaaatcgagtggcagcaaaattttagataaagcagcaactaaagcctacagcttatgtacgttcaaaccagcaatgaaagatggcgtgcctcagcaagactggtatgaaattgaatatccattcgtaattgaataaacaattgaattagcaagaaattaaaaaatattggagatatatgatgaaaaaatcaactcaaccactagtacatttcgcttctgcaagtttaatcgcagcttgctcgttacttccattaagctcagttttcgcagaagaaacgaacaatgctcctgtggcaacagcaactactgaagctacttcaaatacaagtactccaactccaccaccaaagcctgcaacaagtgaaactgttaaaaatccatatggtctagaagccctttggcgtgaaggtgacttagtcgctaagtctaccttgtttattttagtactcatgtcgattggtacttggtacatcatcatctctaaattattacaacaaggtaaagtcaaacgccaaggtaaagaagctgaaaaacatttctgggaggcaacttcgcttgataatgctgcagaaggtttagaacaaagtagcgcgtaccgttttattgcagaaaaaggcattaactcgactaaatcacacggcggctcactacttgaacgcattgactttaatacttgggtgagcatttcaatacaacgtgctatcgaaaaagtacaaaaccatttaggcggaggtctcgcttttttagcaacagttggctctacagcacctttcgtaggtcttttcggaacagtatggggaatctatcacgctttaactgcaatcgggatttcaggtcaggcatctattgataaagttgcaggcccagttggtgaagctctcattatgacagctattggtcttgcggtcgcagtacctgctgtactgggttacaactggttgactcgtcgcaataaagcagtgatggaaaatgttcgttcatttggttcagatttacatgcagttttattaagcggagaaattaataccaacaattcaattaatcgcagcattaaataatcaggagcagacattatgggtatgagtgttggttctgaagatgatgaagaaatgattggaacgattaacacgacacctctcgtagatgtcatgttggttttacttattatttttcttattactattccggtagttacacatacagttccggtgaaactaccagaagaaaaaaatactccgtacgcgaccacgcctgaaaatattcaactttcagttaataagaaaggcgatattttctggaacgagagttatgtaccgaataaagaaatattgttagcaaaattacaagctgtggcacaaaaaagaccgcagccggaagtacatattcgaggagatcagcttacccattttgaagcgatagatcaggtcattagtacgaccaaacaagctggtattggcaaaattgcctttgttactacccctccagcttccccgtaatgattttaaggagaattttatgggtatgaatgttggctcaaataatgatgacgatgtaatgctagaggtgaacatgacaccgcttattgatgtcatgctggtactcatcattatgtttattattactatacctgcaccaaacaatgcgattaatattaatttgccaaatggcacaccgccaccaacaaatgaaaagccacctgaagtcattgatgtaagaattgatgcagcaggcaaagtattttggaataaccaacaggtttctgaccgcaaggcactagagactttatttcaaggtgttgtcgcccaaaaagatcaagaccaaatcaaacttaaaccagaccaaatggctgaatataaaaatgtagcgatggtcatggctacggcacagcgtttaggtgtaactaaaattgggattgtgagtagtaattaatatcgcttttaactttagttaattccatttccttcaacgctaacttgaattctcagttagcgttttttaaaaagaaatacccaactctaaaataatatcaccacattcatcatattccccagtttctataaaattcatttttttataaagttttccagcaatattattagaagatttatacatcgttcggattcgtttagccccttttgaagtcatttcatcaattgccatttgcaacgctaaggtaccataacctttagcttgatgatctttgccaatcataaatcgaaacaaccaaaataatgtctcatcagggggatcaatttccacacaatacattaagaacccaaccacctcatcattaaaacagatcactcttgggcaatagtgttcctcaactttagactcagcaatagaatatacatttggtgcgacatagtccttttgagattcatctaataataattttgcgcatagaagccaattctcacgatcaagattttttaagttaatcaaacttgaaatcctttatttataaattcacgccttatctataagcacaaaatataccgaaaataaaaaagcctccgaagaggctttttttataataggttaaaattagtcacctgtataaccttttaattttaaacgagccgcatgtagtaatggctcagtataaccagaaggctgttcacaacctttaaagataagatctgaagctgcttggaaagcaatattagtttcaaagttagctgccattggtttatacaatggatcattcgcattttgttcatcaacaatttttgccatgcgtttaagcacttcttcaacttgttcacgagtcacgataccgtgacgtaaccagttggcaacatgttgagaagaaatacgtaatgttgcacggtcttccattaagcccacattgttaatatccggaacttttgaacaacctacacctaagtccacccaacgaacaacgtaacctaaaataccttggcagttattttcaagttcgttattaatttcttctgctgaccagtttgtatcagttgcaaatggaggagttaacaagtcatctaatgacaacatttcttcagcttttaactgatcttgacgtgcttttacatttacttggtggtaatgcatcgcatgaagtacagcaccagttggtgatggaacccaagcacatgaagcaccagcatttggatgagcagctttagttgccaacatatctttcatgctatctggttttggccacatgcctttaccaatctgtgctttaccttgtaaaccacatttcaaaccgattgcaacgttacgattttcgtaagcagcaatccatttttgtgttttaacagcttctttacgaacaactggtgcagcttccatagaggtatggatttcgtcacccgtacggtccatgaacccagtgttaataaagattgtgcgatctttagcagcagcaatacagtttttcaggtttacagatgtacggcgttcttcatccataataccgatttttaaagacttcgctggtaatcctagggcttgctcagcacgctcaaataactcaacagcaaaagcaacttcttcaggaccatgcatttttggtttaacaatatacatagaccctttacgagagtttttattttcgttttcactacggatgtcagcaattgacaacaatggtgttaccaacgcatccataataccttcgaaaatttcttcgccatcaactaaaattgctggattcgtcattaaatgacctacgttacgaagtaacataagtgaacgaccatgaagttttgttgtgccaccgatcaaatttttaatttcacggtctttgttcaaagcgcgaacaattgttttaccatttttttcgatagattcttgaagagtgcccttcatcaaacctaaccagttacgataaccttcaaccttttcttctgcatcaacagctgctacagagtcttcaagatcctgaattgttgtaaccgcagcttcaagtgttagatctttaacacccgctaaatcagtttggccaattgggctattcgcatcaatttcaataatgacatgtaggccattactcaaaagaacaacttctgaagggttcgcttcttcaccattgaaacccacaaactgagcttcatgagctaagccagttttagtaccatcttttaaagtcacaacgagtttattctgctcgattgcatatttagttgcatcagcatgtgagccttgcgcaagcgggaaaatttcatttaagaagtttttagcaaactcaataactttcgcaccacgtacagggttatatccttttcctttttctgcaccaccttcttctgaaattacatcaaaaccgtaaagtgcatcatataaagaaccccagcgcgcatttgctgcatttaagcaataacgtgcattacgtacaggtactactaattgtgggcctgctaacaatgcaatttcttcatctacgttttcagtagtaatttggaagtcttcaacttctggtaataaataaccaatttcagttaaaaatgctttgtaagcacctaattcaaatttattgttgcggtgccattcatcaatttttgcttgtaattcatcacgcttagccaataatgctttattctttggactaaggtcgacaacaacttgctcaaagttcttccagtaagtttcactatctaaaccagaacctggtaaagcttcattttcgataaaatcgtaaagttctttagcaatcgctaacttgcctttttgaatacgtgcagtcattgtctttcctgaagttgctactttttataccaagagaatcctagtataccgatttaaattaagctgaatactaatatcacattcctaaatagtaagcattttcccttgcataactattgacaaagataaatttttctatataggaaaatattaaaattctaactaggattcccaacaatttattcaatatttaaagatactgaaactagactttttgttaacagacaaaaaatttcactatcttgttttttctaaagcgtatttagttatatcaaactttgcacaatgaaaaagtactatttcgctaaatttatctttttttgttgtaaaaaaagcgctcaatctagagcgctcttcatatctgatttcttaagaagttttagtcgcatcaatatgtcgatgttcagaatgcaaatactcatctgactgcatttctaataaacgtgaacgagtacgctcaatttcaaaagccaatttctcgccttgatagatatcaataatactatcttgagaggttaaaagtagtttcactccacgatcataaaattcatcgactagataaataaaacgacgtgtgccttcagacaagaagtctgttaagtgaggaacattgctgaccaaaaccgtattataaatattggcaatttcaataaagtctgctggactacggggctttaagcaaagttcagaaaactcacaccataaaacatcttccgtatgccctagggtttcaacaacacggttattgatcacaatcggttcatgagaatttgtttgagtatgagttaaagcagtataacgctctgatatccagctttgagcttcattacctaatggtgatttaaacaattgagcctgttttaaaacacgtaaacggtaatccactcctgcatctacatttaaaacgacacagttctttttaaccatttcaattgtaggaataaaacgatcacggtgaatcccgtttttatataaaccgtctggtgcaatgtttgaagttgcaatgagtgttacaccacgaacaaataacttttggaataagtcactcaaaatcattgcatcagttacgttcgagacaaaaaactcatcgaaacaaataacgacagcatctttataaatttgatcagccacgatatcgagtggattacgttggccagaaagtttatttaactctttatgaacatgttgcataaagtgatgaaaatgcatacgtgttttacggcgaaatggtacagactcataaaattggtccataagccaagttttgccacgtcctacaccgccccacatatatacaccttttggagatgtttggcggcggaaacgacggaaagcttttttagaagctttataacgatttaaaagttctttccatacacgatctaattcttgcactgcctgtgcttgtgcctcatctgccataaactggcctgaagccaatgcctcagcatagcgctctgctggggaagacggagtaaatgcagtactatgagaagattttaaatttaacatatcattttatttcaattttaactgaagagagtatagcgaacattttgtccgaccacattagcttttagcatcaagagttacactcagtaaaactcttttccatattgccgaggactctgtccaaaccatcttttaaatgcatgattaaaagcggcaggttcagaataaccaagtgcttctgcaataacttctattgaatactctttatattccataagtttaagcgccttattcttaataatctgttcacgaatttgtttataactcgtattaagctgctgcaattgatgccttaatgtcctttcaggcattttcaaagcaaaagcggtttccgccatgctcgggataattccttgttgtagctctaaataatcttgcacatattgaataataggcggtatttgatgatcttgttcatttaatctttctatttctttaatacatttagcctcatagatacgatgagtaataatatctgctgaaggaatttttatttccagcacattcttacttaggctaaatgctgcatgtgtagaattaaaatgtagatcatctccataatatgcgtaatattgagtaacggtatctggatcagagggtttcggaaatggtaaatctatacgcatatcaggcatttttaagcccatcatggtataaatatcctgaataaacttataagtgcccgaaatttcgcattgggcacggagtaaaccgatttctgtttttaaatcgaccggtaaatagtttaaaatgatgtgattttcagtttcttgtaagctcaaagtaccaaataaatgcgtaagcttttgatactgtatgcctttttctaaggctgtttgtatatcatggctggtcacaagtaacatgagtaaaggaccataacctgccaatgcgtaatgttgtccaataaataatcctttctctgggtcaacattctcactaataatttgctgtatatcccattccaaactgtcatgaattgttgagcttgggtccaaggaatctactttaatacctatatctgccaaacgtgagtcgacatcaatgcccgcattgcgcattccttgaattaaatagattaaaccaagtgccgatcgtttcattcttttatcaatttccctagactgaaatgttttactataaagaagtgataaaattaattgccgaatctatcaattttcacgtcgatacaatcatgtttaaactgtttaaaaaacgttagtcttgcctgcaatcctctttaccgcatatgcagggtttccaatgctaaacgcaaaacaacatgctattcaaaaaactaaaatcgcaattattggtgctggattcggtggccttgccatggctattcgtctgttacaaagccaacaatcagatttttttattttagaaaaatctaatgatgtcggtggaacttggcgtgaaaaccgctatccaggagctgcgtgtgatgttcaatcacatatgtactctttgtcttttgcacctaaaactgactggtcaaaacgttatgcagaagctcctgaaattttcgattatatccaagatataaccaatcaatatcaaattaaaaactactgtaagtttaaccatgaggttactcatgtacagtatgatgaaatgcgccatgtatggtcactagattttgcaaaccaaccttctctcgaagcacaatttgtagtttttgcatcaggtccgctacatattccacaaatccctcatattcaaggtattgaaaagttcaagggtaaagtttttcactcttcccaatgggaacatgactacagtctagaaggtaaatcagttgcttccatcggtactggtggtagtgcaattcaatatgttccagaaatcgcaaaagacgttaagcaattatatgtattccaacgtacagcagcttgggttatcccacgagatgagcgtaaatactctaatttgagcaaagctctatttaaaaaatcaaacttctatcgacaaattcatcgcagccgcctttattggagtaatgaatctcgcgttgttcctatagttcagccgcaaatcatgaaatatgggcaaaaattagctgaggcatttatacgtttccaagttaaagataaagatttagccaagaaacttacaccagactttgtgatgggctgtaaacgcattcttatttcaaataaatacttccctacttttaaccgtaaaaacgttgaattagtgaccgagggtattcaagaaattaaagagaacagtattattacaaaggatggaaaagaaagaccaattgactgtttaatctatggaactggttttgttaccgatccacgtatttatttaaaacattttacatgtattggtcgcaatcaaattgaattgaaacaggcttggaaaaacggtgcagaaagttattatggaattatgaccaagaattttcctaacctatttcaactggtcgggccaaataccgttttaggtcataattcgattatatttatgattgagtcacaagttaattatattttacagcttattgatctagttgaaaaatctggacagcacgctatagaaattaaaccggaagttcaggattccttcaatgaaagaatacaaacacaacttcaaggtactgtatggcaagctggtgggtgtagcagctggtatcaagctgccgatggaaagaacttttctttatggccaacttatacatggaaatattggctagacactcgtaaagttaatcctaaagattatttgttattaaataaatgctcacagagctatgcagcataatatgttcaatacataatagataggttgataacaatctatctattattatatgcagtccattagtctcattattcaaatttttcttgtattagcatttggttattttctaggtcctaaactttcactaaatattcggcattttatttttaaaatcctgccttatttttcttatattttactaaccagtgtagctttagaactaacactcgcccttgaccaaattgataatccctcaactatacttccacctgctctattaattgcattaaccacttctcttggttctttttttacttgcttattcgcttatacaatttttgataaagaaagtgttaaagggaaaatttcgcttcaactttttatgaatgcattaaaaaatattgccaaggcatttttagctttaacaataggcgtgattttaggcattcttcttacccaattacatacccatattccctttaatagttggtatttactattactttttatttttttaatcggaatcgaacttgcttttactcattttaatcgtacatggttaagttggaaaattcttattgtacctttggccgcctttataggctcgtgcttagctgggcttctcaactattccttacttggtcatgagtttacacttaatgaaatattagctttgggccaaggctatggttggtattcaatgtcaggtattttatttacacagctacattcagctgagttaggtgggattgccttgctcacagatctatttagagagatagttgcaattttactcatgtatacaatgggttggcggtttccacgtccagcgatttcaagtgctggcgctacctcaatggatgtaacattagcaatggtaaaacagtcatgtggcacacattatgtaccacatgccatgatgagcggcttactcttaagtctactcgctccacttttaattactgtgtttttaaacttttaagcaattgaagcaagaatcgatttcaacatttcagttggattttctgctttagtaatcggacgaccaataactaaatgtgtagacccatcaagcattgcctgtttcggagttacaatacgtttttggtcatctgcattactaccctcaggacgtattcccggagtaactaaagagaaatcttgtccgattaactcacgaagaattttagcttcttgagcagaacaaactacaccatctaaaccactttctttagtaagtttcgccaatcttttaacttgttctacaggttcaatatctaacccgatatcttttaaatcttcacgccccatagaagttaaaactgttaccgcaattaattgtgtttgataattacctgcttttaaacgctccacacaggtttccatcattttacggccacctgatgcatgtacgttaaccatccatacacctaagtctgcggcagcacatacagcttgagccgtcgtatttggaatatcatggaattttaaatctaggaaaacttcgaaattttcttcttgaagtttttttacaacagatgggccttcatgagtaaaaagctctttacctacttttacgcgacataaagtaggatcaagttgttcaacaatttttaaagcgtcatattggcttttagcgtccaacgcaacaatgatactcaagagactttcttccatcacataaaatcagcgctattataatagacaagtcagccagtaataaagaaatctattgaaccaagttcttaaatgaggaaatagtgattttaaactagaaggataatgaggaatatagaagggaaaatactactctttatgactagataaagagtagtaccaaaattataaaggagtagaatttttatcttgcggataaatatctacaacagttttttcgtgtcttacatttgcagctgcttctgctgcagccaattgagcactttgaatttgttcttttctcaaatgatcaatatctttgcgaagacgtttgatttcccagcttttttggaaaactcggaaaacttgtacacctaataaaagcccaactacaattccaagcgctaaggtaagcaacaataataaacctaaacgcattgcaggaacttgagtaaataataaatcaacaggaagttctgttgggttctgcaaaacaagtgctaaagaatagccaaatacaataatgagtaatgcaattagaatataacgcataggcaccccacttatgagttttatttattttccagattcattcactgcatcacggagtgctttacctggtttaaaatgtggaacagccttcgctgcaacatctactgacttacctgttttagggttacgaccaactctaggttcacggtggtgtaatgcaaagctaccaaaaccacggatttcaatacgattgtcagacgaaagagcttcgatcatttggtcaatcataatcttaaccgcttcttccactaatggttcagccaagtgtggattttttagcgcaatgcgttcaatcaaatcagacttattaagagcttcagtagtcatctacgacctcgttatttattactactctaagtcgtttgataataacctgtttaaatacaaaacggtagcgcagtatgttgaatactacgctaccgtttacagtaatttgtataaaaagtacaatttcgttacatgaaactgtactttgttaacttattacttcatttgtgctttgatcaagtcaccaatagtcttaggaccattgtcttgagaagctgatgctgtacgcaagttagcaactgcttctttctcttcagcttcatctttcgctttgatagacaagttgatagagcgagatttacggtcaacgttgatgattttcgcttcaacttcttgaccaacttctaagaatttagttgcgtcttcaacgcggtcacggttgatttcagaagctttaagagtagcttctacttcgtcagctaacttaacagttgcgccacgagcatcaactgcagttacagtacctttaactaaagcaccacgttcgttagcagctaagaaatcattgaacggatcgctgttcaattgcttgataccaaggctgatacggttaccttcagcgtctacagacaagataactgcttcaacagtgtcacctttcttgtaacgacggatagcttcttcgccttgttcgttccaagaaatatcagacaagtgaactagaccgtcaataccgccatttaaaccaatgaagataccaaagtcagtgatagacttgattgtacctgaaactttttcgcctttctcatgagacttagcaaactcttcccatgggttagcacgagtttgtttgataccaaggctgatacgacgacgttcttcgtcaacttcaagaaccataacgtcaacttcgtcaccgatctgaacaactttagatgggtggatgtttttgttagtatggtccatttcagaaacgtgtactaaaccttcaacgccttcagcgatttcagcgaaacaaccgtagtcagttaagttagtaacacgtgctttaacgatagaacctttagggtaacggctcatgatcgctaaccatggatcttcacctaattgtttaaggcctaaagatacgcggttacgttcacggtcaaacttaagtactttaacagtaacttcttgaccaacttcaacaacttctgaagggtgcttgatacgcttccaagccatatctgtgatatgaagaagaccatcaataccaccaagatcaacgaatgcaccgtaatcagtaaggtttttgatagtacctgtaactgtttgaccttcttcaagttgagcaagtaatgcttcacggtcagcagaagattcagcttccataacagcacgacgagatacaacaacgttgttacgtttagcatcaagcttgattactttaaactctaactctttaccttcaaggtgagttgtgtcacggataggacgagtgtcaactaatgagcctggtaagaacgcacgaacaggaccgatgtcaacagtgaaaccgcctttaactttaccagagataacaccagtaacgatttcgccatcttcaaagattttttcaagtttagtccaagtttcagcacgtttagctttttcacgtgataaaactgtttgacccataccgttgtcaagagcttcaacaactacgtcaacagtatcgccaacctgaacttcaagttcacgttgttcatttaaaaattcagcacggtcaacaatgccttcagatttaaggccagtgtcaacagtaacccagtcactatcgatgtttacaacaacaccttggatgactgcacccttttcaacgttgaggtttaattcactttcttcaaagagggctgcaaaagattcggtcatgatatacctgataaagtcagcggtcttggatcagacaaggccggtttagttaagtatcaacatagtctttatagactgatcaagctatgcgtcaactgataatcttagttgctaacagtacggctattgacgtaatcaaccatcaacttaaatacttgatcgatcgttaattccgaactatcaataatataagcatctgcggctggcttgagaggagctacttctcgctccatgtctcttttgtcacgcgcttgtatattagctaaaatgtcgtttattttagcatctagccccataccctgcaactgttttactcttcgctcagcacgcgactcagctgaagcagtcaaataaattttagcattagcttccgggaaaattgatgttgccatatctcggccatctgcaactaatcccggagtttgtgcaaatgctctttggcgctcaaaaagtgcttgtctgagctctggtattgctgcaactttagatgcatattctccaactcgctctgtacggatagtttgggttacatcttccccatcgaggaaaactaatgttccctctgccgaggtttcaaacttaatattaagctgacgagcatagttaacacactcatctaaatggctatctaatttttccaataaatcatgtttatgtaatgacaaccctaacaaacgatataaggcacccgaatcaagtaaatgaaattgataatacgcagcaagtttcgccgctaatgttcctttacccgaaccactcggaccatcaatagtaataatttgaactgtcattgaactctcacgaagaagcaaatgctttagctaatctcgaaaagcctagtgtaatcgctagttttagctgtgcaagaattaatttacttacaacaggagcttttgcggttaattcgatacgatacgtaaccaaagtaatataaggagtaatttctgagaactcgattcgacctaaatggtgtttcactagaggattatcaatcagtttatattcaatacgtttgttttcttcgagatgcgtgatttcttctttaagtggtttaatcacgccaaaccccatacgacgaacagaacccactccatcaggtctttcaggatctgccgaatctttaacacgcacaacttgtagtggagcaaatgcagtgttgtaagctgcatgtttagaaagcaggttaaagacatcactaagaggagcattaaattctttttgtatagtaattacattacgcatgaaagttccttatttaaataaatcatgtcaatgaaacggcgttagtgtgccataacctcatgacattttttaatcatttaaggacgttttttgttgtttctcttgtttcttttgttcacgtctttgcttaaaaaaaagacttaactgttgagcacatttttcatgtaaatatccatgctcaaaagtaaatttatggttgtaataaccattttctaataattgacgtgcactcacgagtgagccagctttaggttctgttgttccaaatacgacatgtttaattcttgcatgtactaatgctcccacacacattgtgcacggctcaagcgtaacgtacaaagtcgcatcttcaggtaaacgataatttttcaatgactcacaagccgcacgaatagcttgaatttctgcatgagccgtaggatcagataaaccaattggagcattaaaaccagctccaattaacttgttttgactcacgattacagctcctacaggaatttccccctgcttggctgctaattcagcttgctcgtaagcaagctgcatccaatactcatcactaaatttagacattattgattatgacactacgccatattgtctaagtaatgcattccagctatcaatcgtcgtgatcggtggatcatcggccaaaatacctcgtaatgtaaggtcttcacatgctttccattctggcgataaatctttatcgactaaacgagcacgtacgccttccacaaagtcaggatggcgaattttccattcagagatttgcgcttctaaatcaaaaacttcatcccaagaatgaacttgtttaccccattgccataacaaccaagtaattgctgccgtactaggcgagcccttttgtaagttttcactcgcttgacgcaaccagtcactgcttgcatctcgcaagctgacgatcgcttgatagtcttgttcaaagcttgaaccacggcaaacactatgtataacgtctaacgaattttgtaatggccctgctgcaaccgggcgatgcaaactatttaaagtatcatcaatcgcacggaaatcacctgccggatagtgagcccaattaatattgagtactttctgtagaacattatcacgttgcgcttcacaaatatgcgtcgcccaaccaatgctatatgccccagcagccgtcataatagaacctgtcaaaccggtaaataaaccaatttgcccacggtcagcaaggaaacggcttgctccaacatcagggtataaaccaatattaatttcaggcatagccaaacgtgaatatggtgtaaccaaacggaaaggtgcagccataaacaagcctaaaccaccacccattacatagccttcgccccaaacaacaaccggtttagcatagttatgtaacaataaatccaaagcatattcttgctggaaaaatttatttgcggtttctacttcctgattaattaccagctgacgtaatttgcgtacatctccacccgcacaaaatgcttttggtgtagtcgagtccaaccaaattgcttttacttgctcatcatcacggaagtcttcaaatacacgtaatagagccgttacgattgattcatctaaagcgtgtaatgatttaggtcgattcaaacgtacaatacgccaaccatttttcgcttcttcaactaccaaatccggatgatagctatttacattgggagagttcatcatgcgtccaattgccagtctatgggctcaatgccatgttgtttcaaatattgatttgttttggaaaacactttgcatccaaagaaaccaccacgattagccgcaagtggcgatggatgtgcagcagttaaaaccaagtgtttttctctatttatacgttgtcctttacgttgtgcataagcaccccataaaataaaaacaatgtgttcacgttgttcatttaaaacatcaattactgcgtcagtaaactcttcccaaccttgtttttgatgtgatgtgggttgccctgcttctacagtaagtacactgtttaataaaagtacgccttgctcagcccatttggttaaatcaccatgacgagaaactggcacacctaaatctgtgtgtagttcatgaaaaatattacgtaaagatggtggtaatgcaacccctctttgaaccgagaaacttaagccatttgcctgatttggaccatgatatggatcttgccctaatataacgactttcacatgatctaacggcgtaatatttaaagcattaaatatttgtttacttggtggatatatggttttttgagcctgtttttgttgaaacaaaaagtctcttaaactatccatataaggactcagtaaaaatggagttaatgatcttttccagctttcttctaattgaactttactgagtttgtcttgctgttgctcagttaattgcattaatgtcatcctagatcaattttcatttctacaaacaaaaggaagttaacttacacttctacttgtaagttaacatgcggattatgaaacttaatcccttgttttaaattttcatacatatctggatcagcccattcggattggacttgttctgaaaaaataattccctcaaggtttaacagccccatttgttcattttgaatatcttcaagaaaactttgggcataacctgtatcggtttcatgaacaatcactgaatagacttcaacatcaccttccccattttgggtaacagtagattgtaatacttgctgggccaaatagaagaagattcgagaaaattgctcagcagatggcgaaactggtaaagagatccaacgcgcgctaaaagtcttacaagcatcaatatattgcggatcatctttttcccagaaacaaatcgcatgatcaaagctatcgaaaaggtccttaattacgccttttaacagcccaaaatcatataccatttgtccatgatctaatttcgaagctttaagtaataactcgactttataactatgcccatgaatagatcgcttacaacgatccgatgtacagttacgtacaacgtgtgcattttcaaacttaaataacttacgaattaacatgtgccaaatcgatcattccttctaagaacattattataaagcaaaagataaaaacttcgcaccacttttcaaatagaaacaattagcaaaaagtatgataagagatgtgaagaaattttgaagatattgattttttactttaaatactgcctatacagaagtatgacctcatcccttttattaataagtttcaagtattacagactcagaaaaaatatcaataaatttatttagttaaatggagccatgcttcttgaataaacatatacttgtttatcttttctcattaaagcactagtaaactgtcgcttcctattatttagaacaacttcaatctgagcttgaaagaagctggatttaacatcaataagactatttacttgatttttcctttgactatcaaccgctgaaaaagcattcaattgccacaattcatctacattttggaagaactttaaattttgttggcgtgtttgcaattctttttcaatagctcctatatctaatttttcatccatacttgctaaaaccaatggcgaagcagtattaatatttaacttcgaattttctggtaaagcagaaatatatggagcaattagatcaaatttttttccatcaaagcctctcactagctttaactcttcaatacggtggaatttagtattcgcagccatgtaacctggatccaaaccttcataataactactttctgcccccattggcccagttggctcatcatttggatcttgccaatcaatcacagcttggcttaattcggctggtaatcccacacgtaccaataaacgttcaaaccaacttttagcatcttcatttacaatgccttccccgttagttagattatttaaattaaatttaccagactcatcaagcaaacgaccagatactgaaccctcttcaatagaaaacggcggcataggttgtgcccatgtctcttttaaatgatctactccacctgcattatttgcatcttgaattaataattctgaaaaaaaggcttctgcactttttgcataaagcaaagattgattttggcgcattaagtaggctgtattttccatagtattattttgatgcttggcaatagaagccgctaaaattgtagccaaggcaaccataataagtatagtcagtaaagcaacaccctgttggtgtttgtaactaacggccattatgaattaccttcctgcgaaagcgataagtcaccctgatttaagctataaatccactcataatttacaccagcgactgtaagttggatttttatccctttcggtaatttttttaactcattaggtttcgttggatcaatattaacctcgggccattttgtgacttcttgcggagtcaaaaccataatctgatattggtcgacttgacttaacaaagtactcgataaaggttgctctctgttcgaagtattcaaatttgtatatttaagacgatataatttttttggtctgcatcataacgatattcaattcgttcaaatggtgataagccttgttttaaaggatccgttacgcctgctttgctaaaacgtaaaatttgattatcgatttctaaagctggatgaagttgaccaccttggtttgcggataaagggataatctgcaaagtatcacgaagaatttgttgataagcatcttgtaattcaaataaatgcacttcatgttcggcattacgatcacgaactttgagcaagtaatcgaaaattttccaccccaataaagataaaaccgcaaagatagcgatcgcgactaacaattcaaccaaagtaaatcctgaggcgcgagttaatcgagcactgctcgatcgtgctgcaaggcgagaatcaatgcttcggatgtgaatatatttattttttatcattattttgctttcactggataattaaaaaagaccatatgagtaatgccattttgtacttttcccttatccggatcatacaaactcacttgtaaatcaattttttgaacattcgggctaatagtagattgagctgacttatcaatttgccaagtttcaccttgggaagttacttgcttactctgggttccttgcaaccattcttgattaatctccatcatagcaacttcattcattgctacaaattgagctttggttcgcaaaattgcatttgaagtggactgcgtgtactgcattgccactttagttaaagcgacagctgcgactgcaaagattgccaaagcaaccataacttctaagagggtaaagcctttagatttcatttattttacccaagtgatctatttgtatttccgaaccaatcggtttttgttctaaataaaattgtattttaacggttttagcttctccattgccaaaccagatgagttgaggcgtttgtcctccaatcaaatctgtatttttagctttagaataattctggtcatccaagggttgtactgaaaaagaaacatgagcaggaagttgccgtgttttaaactcagtatatttctgccaacggttttttatatcttgtacttgtaaagtgctttgatcgtgatattcataaagttcataagaaaatggtgagacatctgtctcaccatgagtttctaaagccaatacacgtgattgatcgagcgattctttattaattttctgcaaatcgagtaaaaataactctctcgcctgcattgcctttttttggtcgacgccacctatatttaatacaaccagagaagtcataattgtcataatcacaatgactaccatcacttctatgagggtaaagcctttttgtgattgaaatggtagattcgatttcatatcgacctattaagcgtactgttcaactgcttgtttgggtaaggctaatgcctggtcaatgtatgctactcgcaaagtatctcttgaacccaaataacgttgataaaagcttgaattcagaattgcagcagctccatgagtgagtgaccagattgaagccaagtaatctcgtgtagtcatatgactctggattgactctaaatagtgatcagtcatacgaataataatacgtaagcgctgctttctcacttggtaaagttcattaaaaagatggtgtacaccttgggcagtaattgaaagcttttcttcaatttggtgaaacagcactgttctttctggatggtgcaagtgatgcaacataaagaaagctaaatgttctggaaaagccttttcagtatcttgaaccatttctagtaacatgcgctcattacgaataattaatagcatgtacaattcatctttactttgaaagtgcttgtacaaagtaccttttgccaaatcaagctcagcagccagcacatcaagtgtcattccggcttcgccattttctaacaacaactgttccgcaacttgaaatattaatgcttctcttgctcggaactgagcttgacggtccatcttcacgcaattactctctttatatagtttctataagttaaatcgctttaagtaaattttcaaaattttgcgaggtgattcttgcaatttcctcaactggtttatcatatacctcacttagtgctttcgctacataaggtacatattttggttcattcgttttaccacgatatggtactggagccaaataaggactatctgtttcaatcaaaagccgatctaaaggaacttgcttggctacatctcgtagatcttgagcatttttaaatgaaacaattcctgaaaaggaaatatagtaaccgcagtccaatacagcttttgctgtttcccagtcctcagtaaaacagtgcaaaataccatgtgtagattgttcagctcgaataatatccaccgtatcatgttttgctgaacgtgtatgaacaactactggttttttaacatttttagaggcttgaatatgacgagcaaaacaatctttttgctcgttaataaagtcagtgctgtggtaatagtctaaacctgtttcacctaaagcccataccttttctgattgagccaattcagtcaaatactcagtcgttgctcgagccatagtatcaacatcctcacacggatgtacgcctaccgtataccccacatcttcatgacgctttgcgatttcagctaaagcaatatgatcatcaaggtcaactgaaattgccataaacttagaaacaccttctgctcgcgcagcagcaagtgcgagatctaaatcaccgttataaggcgttaaatctaacattgttaaatggcaatgggtatcaacaaacactgttctttcctatctgcttacatggtataacttgggcgatctaaagacatactaccagctaaaatccgctcagcttcagctttatagtaaattcctttatcaccactcaattgaattgcgaaaccttgcggtttaaatccactttgcttatgtgaaatccaaactactttaccagttaaaggaattttttgtgattgttctggtaacgtagctaaaataaaaatttcctgacccatcttcactttttgcttcgatggtacaaacaagcccccaccttgtacatatcccatataacttgcttgcaatgttgctctatctggaatattgacctgaataattccacccatttgtggttgcattagtgttccccttaaacgttcattaattttataaaaagttgatctatgatgagttgtgtttgtacattctgttcaaccaatcttttagattgctgtaattcctcataaagactgaataagctttctaaattatagttttgcgccaattgatggaactgtaaatcaatatttttctgtggttgattgagcttgacacaaattaaatcccctaacaagtattcaagaagcatcataaaatcactaaagttgagttctttttgccatttagccgaataaaataaaggcatatttttttgatttacaactttagtccaatcttctaaaaaagactgtcttttagcaaaccaatcactagtcgcaatttcaactgcttgcaaaggcatatcattagaaaggcctagcaataattcaggtggtacagatgctatttcagctaaatgttcatttaaataagatgtggcttctgtatatgaaatacggtctaaagcaaaatgctgtaagcgacttcgaatggttgccggtaatttcaaataatgatcggccaacaagattaaaacgacgcgttcacctggctcttctaaggtttttagcagcgcatttgatgacgcaagatttaaagcttcagctggctcaataacaacaacacgccatccctcaccagtttgttgtacaaatggcaataaatctcgaattttttctattttaatttttgcattttgttttttattttcttcatctgtcgtgatatgaacatagtttggatgcgtatctgattttaaccattgacagctactacattcaccacaagcaccttgaggttgtttatttaaacaaagtacccacgctaagaaatgcttagcaaaagcatgtttaccacaaccttgtttaccataaaataataagccatgcccaatattaggaaaacgtgttgttaacgtttcccacattgtctgttgccacggataaaccttagaagtcacattctgattcattaaattaacgcttactcaaaagactcaacaggcatattatttaaacgatcaagatctgcttgagtgtcaacacctggtggtaaattcgcttctgctacagcaatagcaatacggtgtccattttctaaaacacgcaattgctcaagactctcgagcttttcaagtttacccatttcccatgtaacatattcttgtaataagctcacacgataagcatataaacctaaatgacgaaatgcttggctatgtaaagttggttcagcttgtttagcactatctcgatcataaggaatagttgcacgactaaaatataatgcttcattttgtttagacatgactacttttacgatactatcacgctgaaattcatccaacgcatgaataggctcacataatgtagacattgaacagtttggcttatcaaccaaaagctttgcaacttgctgaacaagctgggctggcagtaatggctcatcgccttgtacgtttacaataatgtcatcagcatcccatcctttaatacgagcaacttcacttaaacgatctgttcccgatggatggtctgcacttgttaaaacaacatcaacgccctctgcacgacatatttcagcgatacgttcatcgtccgttgctacacataggtcatcgaaaccttcaactttttttgcttgatctactactcgtaaaatcataggacgatcatgaataagtaacaatggcttacctggcaaacgcgaacttgagaagcgtgctggaatgacgatatgtttcattttttcttcctaagatatttgaatatcaagcttttgcaattgttgatttaaaatctgatagcactctgtagacaaaacagctttaacaggtacgacccagatagaacgtttaaagtctggatgtttttcaagtaatggtaaaaatttaacagcatctttttctgttgtaatgatcggcaaatcatcattaaaaatgagatcatcaatactgtaatcatgatgatcacgaaaagcatgctcttgaaattgtttcacccctaaacctttaagtgtttggtaaaagcgctgaggaaaaccaatgccgactactgcatggtaattattttgaatattgaatgataattcagttgccgaagaaggattcaacaagtaaggctggcctgcatcaagatgcatatgcaatgtagttgttggtgtgaaaatatgctcgattaccgtactagtttttaaacgttccgcaggttcacgtaaatatccttctggtaataactttctatttccaaggccacgattttgatcaagtacgatccattctatttggcgacctaatgcccaatgttgcaacccatcatcactaataattaaatctagtttagtcgatgctaataataactcgattgctacttgtctattgggtcctactgccataggtacgccagttgactgtacaatcaaagcaggttcatctcctgcttcagctgcttgactggccgatgttaccaacataggaaaagggccagctccaccatagcctctactaattacccctacctttacattatgctgctttagataattgaccagctctattaataatggagtttttccacttccccccaccgtaatattgccaattaccatgaccggcacaggtgcggtataaacttttttaaagcctgaactataaagataacgatttagtaaaaacccagcacgatacaagcaagacaaaggacgtaaaacaatcaaccaacttgattgcttattccatgcattttggatcagctgggctaaagacatacttaatggtcctcaaaattacgctgatgtaattgataataagcaccgtgcttagcaagtaattcttgatgagtaccttgttcaacaatttgtccgcggtccatcacaacaatacgatccgcattttcaatggttgatagacggtgagcaatcacaatcgttgtacgatcttgcatagcttcatcaaatgcttgttgaataaagtgttcagattcattatcaagcgcacttgtcgcctcatccaaaatcagaattggggcatttttcaaaattgcacgagcaattgcaatacgttgacgttgaccacccgataaatttagaccttgagcacccaaaacagtatcgtagccatttggtaagttcataataaagtcgtgggcataagcagcctttgctgcagctattacgtcttcatcacttgcattatgtaactgaccataagcaatgttttcacgtacagttcggttaaacaaaacaacttgctgatttaccattgcaatttgtgtacgcaaacttgaaagctcaatatcacgtattggcaaatcatctaaataaatttgaccacttgagacttcttggaaacgtaccaacatgttcactaaagaagttttaccagcaccagagcgccctaccaatgcaacagtttcgcctggacgaatatctaaagaaaagtctttaatcgcttgcgtaccgtcagcatagttaagtacaacatggtcaaaacgaattgcaccttgcaactgcggtttaagttcaccactattttgctcttcaggtaaatctaataattcaaaaactgagtgtgcagctgctaaaccccgctgtaacttttcattcacatctgtcaagtttttaacaggctttgaaagtaaccctgctgccgtaatatatgcaacaaactcaccagcagttgtattccctaaaatttgtggtcttaatgctaaccatacaattagagccattgcacaagccattaccacttgaacaacaggactatttaggttttgcacaatcaccatttttaaaccacgttttaagttttcttccgatgacttatagaaacgctcttgttctgactcttcaccagcgaaacttttaacaactgcattaccattaatactttcttgcactacatggttaacatcacccatagtatcctgaacttgcatcgagagtttgcgcattctttttgaagctttacgcaccaaaatcccaattacaggtaagaacaccataatacaaattgttaaacgccaattggtatagaacaaataacctaacaaccccaacgtaatcatgccatctcgaacaatggtttttaatgattcagatgaagcagctgtaagttgctcgacgttatacataattttggcagtaatatgacccgaagagttttcgagataatattgagccggcagtcttagaagttttgcataaacttcttggcgaatactaaaaaccaaactgcgcgagatcacagccgtatagtaccctcccataaataggccaaggccacggaagaataccaataaaatgattaataaagggaaccaatctagatccgctctactggcactttgaattgcatcaataataaatttaatgagcttagcaacagaaacctccgtcgctgagttcataccgaacccgataagaactaataaggccacgccccaataaggttttaaataggatatgagacgtaaataaaccttaaaatcttgattcactcagaaaaacctctagaaggaactttggtactaatattgatgttaacaaaaccgagttgtcctgctacatccataacacgaataacatcctgatgggatgcttttgcatcagcagcaatgataaacataaagtcacgtcgctcttgagcaatttgcttaattgcagtgctcaaatcagccacatctttggtagatagcgcctgaccattcacagcgtaatgtccgctagagtctaccacgacttcaattttatgatcgtactgttttggtggaacaccttgtgcatctggtaaagttaaattgatgcgacttggctgattaaaagtggtagataacaataaaaacactagaatgaacaataaacagtcaatcataggtgttaaattgatatgaatgtcttcaacttgagaacgtttaaacttcatattgtgatctacccatcaaccaacgcggcgatgttcttgcatgactgaagaacgtttgtaaaacaatgaggcatgaaatagcgtagattgttgctctaactcagcaatataatcttgcactactctttgaaaatatcgataggaaataagtgcaggaattgcaatgagcataccaactgctgttgtgatcaaagccttggaaataccgggaatcattaaactaggactacctgccgaaccaaaatcaataaccaaaaaagactcaataattcccacaactgttccaagcagccctagtagaggcgctatagcacttaaagtccctaagaagttaatatttttttctaaataagaaatttcttgagaagccatagcttccatttgtgctcgcgcaaattgttcgccatgttcctgatgctcaaaaccagcttttagaatattgcccaatgccgtgctttgcgcattagtatcctgctccaaatttgttatgacaacagaaatatctgcactgccatcattcattagtactttaggtaaaacttgtgaacgtcttaaacgtacaaaacgctcaatactaattgcgacggttaaaattgaacacaaaattaaaggcagcattaaccagccgcccgctttcacaagttcccacatattttcttccccaagaatataaattagaaatatatgacctaacttagaattaatctggtaaacaaatattcaaaataccatctaactcatcgagtgaatgatagtgaataacaagcttacctttacctttctggttatgatcaattttaacattggcaccaaaacgttctgataatttctgagttagttgctcaatgtctggtgcaacaggagctttttccttttcctgtttaggctcgctccaatcgcgtactaactgctcagtctgacgaacagataatcctttttcaattacaatttttgcaacttcaagttgttctttgccctttaaagttaagatggcacgagcatgccccatatcaagctggccttgctgcataaactccttaatatcatcagccaagctcaacagacgtaataaattacttaccgttgttcttgctttaccgactgtatcagcaatttcttgatggcttaaaccgaattcatcatggaatcgttgtagcgccaacgcttgatcaatcgggtttaaatcttgacgttgaatattttcaataagtgctaaagcaatagcaacctgatcatttaaatcacgaacaattgcagggatttccgttaagccagcaatttgagctgcgcgccaacgacgctcacctgcaataatttcgtaaggatgagcttcatcatctacaggacgaataacaattggctgcattaccccatgtttttcaatagaggatgccaactcttgcaaatcatgctcatggataaaacgacgtggttgatattcacctcgtttcaacaacttcacatcaatttgctttaactgaccatgatcaagcgcttgagcttctagttgtaatttttctttttgaattgaaccaagtaatgcatctaaaccacgacctttcgccaatccgcgttttttgatgctcatactttacttcctttcttcactttacttttctttaacatctcagccgcaagatttaagtatgcaactgcacctttcgaacttttttcaaaataaatcactggcaaaccatgtgctggagcttcagccaaacgaacattacgtggaatcacagtgtcgtagagtttcttaccaaaatattgttccaactcagcagatacatcgcgagttaaggcattacgcgcatcatacatggtgcgtaaaacaccaataatttccaaatctggatttaacgctttttgaatacgatcgatcgtttgagttaaatctgccaaaccttctaatgcatagtattcgcattgcattggaatgattacaccatctactgcagctaaagcattcacggtaattaaacttaagctaggcgcgcaatcaacaataatgtaatcgaatgagtcccgaatttcattcaaagcattctttaaaatgaactcacgaccttcttgctcggcaatggcaagctcgacaccagaaagttcacggtttgaacccaaaactttatatccaacctcagctttttgaattgccgtttcgattggcacttcacccaataacacatccgtaattgaataaagtagatcattcttttgaataccagaccccatcgtagcattaccttgcgaatctatatcgacaagtagcacacgttttttcaatacagctagtgacgctgcaagatttactgcagtcgttgttttaccaacaccacccttttggtttgcaatcgcaataatttgagccatggtaaccctaatactttttatttaaattcgttgaagtaaaagtaaatgacgttgttcatcaagtctcggtacatgcagttcaatcactttacatgaaaattcctgcttaagctcttccatttcttcaactggaatcagtcctttcatcgcggcaattatactctgctcatgtaaatatggacgtgcagcctcaacaaaatctgttaatgatgcaaatgcacgacttgttattacatcaaattggccaagttcatcaattgtatcttgattttcaacacgcgtttgcacagctattacgtttttaagcttaaggtcagcaataaactgtttcaaaaaacgaattttcttaccatttgaatcaagcaatacacaagagcgttctggctgacataaagcaatgatcatgcccggcatgccaccacctgtacctacatcgagcaaacgacctgctggcaaatctttcaaaatacttaggctatccaacaaatgctttactaacatttctttaggatcacgaatcgctgttagattataagctttgttccaaagtaccaaagcatcttgatacttcaacaataatgtcaaagcttcatcgctaagcgataaacctaatttttgactaccctgttgtaactcttgaaaaaacggatgcataaacagataacatctaagtaaaatttaaaacaaagtatacccatttatgcatcgtggaacactagttaacgattagcgattacgcagttaatcgtagaagccttcacgaatttgcaaatctagctccattaaacgctcaggcgttcccacatctacccatgcacctttaagcttttcaccagatattttttgattgtgcatcgcttgcttcaacaatggggctaacggacgtttaccagcttccaatccatcaaaaagcttaggatggataacagatacaccactaaaagtgaggttctcgcccttcacatcttgatcaaatgtaaaagcgcgtccatttaataatgtaaagtcgccatcaggatgctgtttaggattatcaactaatacaagatgtgccaaatcatcatttaacttaatatggcgtagagcttcaaaatccattgtagtccatacatctccattcaccagaatgaaaggatctgttccaagcagtggcaaagcattaataattccaccagcggtttccagcccttcttcttctcgtgtccaacggatatccacaccaaattgagagccatcacctaaactactgatgagtttgtcggctaaccacgcagaattgatgactatgtcggtcacaccaattttcttaagtttttcaatatgccacacaataagtggcttaccacctacctcaagcagaggctttggtgtatatagcgtgagtggacgcatacgattgcccaagccagcagctaaaatcattgctttcattatgctgcaacctcataagggccatatttttcaataaatttaggcattaccgaactgtgaataaatgccatgaagtcatcaagctcatgatagccacggctctcttcaagtaaataccacatgactcgtggtaaatccttcaaataaccagacttaccatctcgctcaaacaaacggacaaaaatacctaaaattttgatatggcgttgaattgccattaaatcagcatcacgtttaaattggtcaaagcttcggttttgtttagcagatgctggtaaaagctcatagaacactttaaaccattgataaacacgctcagcattccactgcacgtatgcatcacgtgtaatcgagattaaatcatatgtatcagcaccaataaccgcgtcttggaagtcaattactcccaattcttcttcattagcaattttcattaaattacggctatgaaaatcacgatgtacaataacttgcggttgagctaatgctgcctgagccaagaaatcaaatgcatcatcaatagttttcttttgctcagctgttggatggatatcgagtgacggtaacatccaatctgttaacaactgcatttccgataaaagcttttcataagaataagccgggaaatgttcagccccattaatcgattgcaaatgaataagctgtttaaaactctgttcataatattgatcaactgtttcatcgtttaacaatgtagacagcagcacatcaccaaagtcttctaacaataaaaaaccttgatttaaatcttttgcaacgatctgaggtacccgaaccccatgccctgcaaaaaactcgtcaatggtcacaaacggaacacagtcttctttttcaggaggtgcatccataagcatatacgttttattttgtaactggatgcgagcataacgtcgaaagcttgcatcccctgctaaataagcgatctgaaattgatcattttcaagaacagatgtaagccatgtatgtatcaattgttcacgttgtgtattcatttgcaataaaatctaaaacaagctgagatttttgaagggttaagtgtagccacttataaactttttctctatgatgcgacaataattaattgtgaattagcatacttggttaatgagacaatgaagcatcagtttaaatttaatcctttagcgaccgctatttttacgctcttatgtagtggctccatacaatcaagttatgctgagtcagctggtgttgtctccaacatagacaataatcaacttaaggcgagtattaaggaagcctatccagggcaggaattctttcaacaatattatgttgataaatctacccctgaggcgcaattgcgcaataataaatatttgagttcagcattctgccaaggaacttggattacaccaattaatcctgaaactaaagcgttagatgcagataaggctacttcagttgtaacggctgattatgggcactacaaccctgccggcgactctgtgttggaaggaaacgtggtgatagatcaagaaggccgtacagttcgtgccgataaagtcaccattgataaaactcaaacatttgcacatgcacaaggccgagtacagttagctcaaggcggcttactctctcaaagtgatgaaattgattacaatctaaagactcaaaccggaaatttagataatagtttttatatttctgaacaacaacatgcccatggtcatgctgggaagatcgagagaacctctccgaatgtaatggttctcaatgatgcgacttacacaacctgtccgccaggccagaaaccaggttggaaaattcaagccaacaaaattgagttgaaccaagaaactgggcgcggtgttacgcgcggaacaaaactatatgtaaaagatgttccagttctagcagttccctactttaacttcccgatcgatgaccgccgtactacaggtatcctcaacccacaatttggtttctcaaacgatggtggtattgaactttcggttcctgtttatttaaaccttgcgcctaattacgatgcaacaattacgccacgttacttagcagatcgtggggcaatgttacaaggtgaattccgatatttgacggatgggtttggtgccggacagatttggggcggcattttgccatctgataaagaatatgatgataaagaccgtaaagatttccattttttacataattgggatatcaacgaccaatggtctaccaaccttgaatataactacgcatcagataaagactacttctctgatttagatagtagccctatctctaaaacagatcttaacttacgtagagcttgggaacttaactatcaacatggtattccgggtttaaaagcacagcttaaagtcgaagatttccagacccttgacccagaagtaaaagacgtcaataaaccatacgcccgcttacctcaatttttattaaattatgtcactggtaatccactaggactacaatacgaatttaataacgatactgcttattttaagaaatcaattaacgatgattctgcacaagaaagtagcggtacgcgtatttataaccagtttgcaacacgttataactatcgaacaccagcagcctttgtaattcctgagctttccgtacgttctattcaaaccttctatgacaaggacagtatcgcctctcaaggtttagacggcggttctgaaaacaaatcagtcgttgtgccacaatttacattggacactggattgaattttgaacgtgagggcaaatatttacaaacacttacaccacgcgccttctatgcctatgcgccatacaaaaatcaagatggctacccaaactttgactcaaccactgcgtcaattagttacgatcagttatttaacccttaccgcttctatggacatgaccgccttgaagacaataactttttatcgttaggtgtaagctatagtctttttgacacagtaggcttagagcgtttacgcgcaagtgtgggccaaagctattattttgaagatcgccgcgtcaccttgaaacaacaagatgaaattgatactgaacgtaatacaggtcctgttgttagcttatcaagtcaacttaatcaaaactttaccattgctgccaactcggcatggatgtcaaatggtgataatgcacagcgtgattttcaactttactatacaggcgataaaggaaatctatataacttaggctatttctatcgtaaagatattccaggacgccaagatacatacgaccaagttgttgcatcgtttatacaaccaattaaagacaattggcgtattatggggcacgtacaatatgacatggacaatgatgttgcccgtgaattattactaggtgttaattatgaatcgtgttgctggggcatttctgtctatggccgttcatactataacgatctagacgatccaaaatctccagatgttagtgaaaagcgcgcgatcatggccgaaattacactcaaaggtttaggtggtttaaacaataaactcgcgtctttacttgaaaatcgcgttttaggttttaacaaaattaatcaatcttggacacaacgttaatgaagacaaaacatcttaaacagttttttaaagcgacaacccttgctgtattaatatcttcatcaatgcatagttttgcccaacctactgatgaagttgtggcaattgtggacaatagcgtaattttaaaaagtgaccttgaacaaggaatggctgaagcagctcacgaattgcaagcacaaaaaaaagaagttccacctcaacaatacttacaatttcaagtattagaccagctcatcttacgtcaagcacaacttgaacaagttaaaaaatatggcatcaaacctgatgagaaaagtctaaatgaggctgtacttaaagttgcaagtcaatcaggtagcaaaagcctagaagcctttcaacaaaaattagatgcgattgcacctggaacttatgaaaacttacgtagccgtattgctgaagatttagcaattaatcgtctgcgtcaacagcaagttatgtctcgcattaaaatcagtgatcaagatgtagataacttcttgaagtcaccacaaggacaagctgctttaggtaatcaagcccatgtgattcatatgcgaatttccggagacaaccctcaagaagttcaaaatgtagcaaaagaagttcgttcacaacttgctcaaagcaatgatttaaacgctcttaaaaagctttcaactgcgactgtaaaagttgaaggtgcagatatgggattccgtcctctttctgatataccggctgaacttgctgctcgtattactccactgcaagacggtcaaacaactgacttaatttctgtacgcgatggtgtacatgttctaaaacttttagaacgtaagcaaaatgaacagaaagcattagtaccgcaatatcagacacgccatattcttattcaaccttccgaagtggtaagccctgaaaatgcgaaacaaataattgatagcatttacaagcgattaaaagcgggtgaagatttcgctattcttgctgcaacttattcaaacgatacaggttcagcacgtgatggcggcagtctaggttgggttacgccaggtatgatggttcctgagtttgataaaaaaatgcaggaaattcctgtaggtgaaattagtgaacctttccaaactcaattcggctggcatatcttacaagtgacagacaaacgcgaaaaagatatgacacatgaatatcaagagcgtatggcacgtcaaattttaggtgagcgtcaatttaacactgaaattgatagctggttgcgtgaagtacgtgcaaatgcttatgtagaaattaaagatccaagcctcgacaaaaagaacttacaaaaataagttaatcttttgtcgttaaaacctgtgttgatcacaggtttttttataaacaaaacccagccattaaaaaaccggttatatgaataaccggtttctataaatcagaccctaacgggaattatttataacgatcaaccattttctctaaagaaattgggcgaatcttgtcagcattaccagctgtaccgaaagcttcataacgatcgatacaaatttgtttcattgaatcgacagttttagcgaaatacttacgtgggtcaaattcagctgggttttccgccatgaaacgacgaattgcacctgttgaagctaaacgcaagtcagtatcgatattgattttacgtacaccatgtttaatcgcttctacaagctgttcaactggtacaccataagtctcaccaatattaccaccaaactcgttaattacttttaaccattcttgtggtacagagcttgaaccgtgcattacaaggtgagtatttggcaatgccgcatgaatttctttaatacggtcaattgctaaaatatcccctgtaggtggacgtgtaaatttataagcaccgtgtgaagtacctacagcaattgctaaagcatcaacatttgtatcagcaacgaattgttttgcttcttcaacagaggttaaaagctgagaatggtctagtacaccttctgcacccacaccgtcttcttctccagccatacctgtttcaaggctacctaagcaaccgatctcaccttcaacagatacaccacaagcatgagccattgctaccacttgacgagttacatctacgttgtaatcgtaagttgtaggagttttaccatcagcgcccaatgaaccgtccatcatcactgagctaaaaccaagttgaatagaacgttggcatacatcagggcttgtaccatggtcttggtgcattaccactggaatgtgtggccattcttcaattgcagccaaaataagatggcgtaagaatggagcgcctgcatatttgcgagctccagcagatgcctgaacaattacaggtgaattggtagcatctgcggcaagcataattgcacgcatttgttctaagttatttacgttaaatgctggtacgccgtagttatgttccgcagcgtgatccaagagctggcgcattgaaatgagtgccataatatcctcccaggtagtgcggcttattctaccttgtcatttatttcaattcagcaacaaatcacagtatttcaaaaaaaatccctgcatttgcagggaatttttaacaaaaaacaacaaattaatgcgtttctgaagcagccgtctcgctagatgcactaccttcaaccacatctgtattcttttcatctaaaactggcttatcaagcgcatcgattgcagcttgttgttccggagttactttgtcagcaacagctgtagatgccgcatcttggcctgcttgagccgcctcttcttttttcgcacaagcagtcaacatcattgggacaattaacaaagcagcaaaggtaagttttaaattcatcactattttccacaattggtgatttagtactcattatattatttcaggaatatgacaatttaatgacttatcaatgaaaaagggattgataactcaatcccttcttatttcaatataacagtttttaagcacgctcaagtaaaacggcaactgctggcaatgtttttccttcaacaaattcaaggaatgcaccaccacctgttgaaatataaccaatttgatcagctacattatatttatcaatcgcagctaaagtatcaccaccaccagcaattgagaatgcatcagattgtgcaactgcaagagaaagtgctttagtaccttcaccaaattgatcaacttcaaatacaccaacaggaccattccaaagaatcgtttttgaagttgttaaaatatttgcaaatgctttagctgtttcaggaccaacatccaaaatcatatcatttgctgtgacatcttcaactttcttaattactgcttgcgctgctgccaaagaacctaagaaatcttcgaagttaatttgtgaagcatcagctacaactacatctgtaggaagtggaacacttactttagcagcaatttgttttgcagtttcaaccaagtcagcttcatataaagatttaccaacattgtaaccagcagccgccaagaaagtatttgcaataccaccgcctacaatcagttggtcacaaataccagataatgaatttaacacatcaagttttgttgaaactttagaaccagcgacaattgccaccattggtttttcaggtgtttgcattgcacggccaagtgcatctaattcagcagccaataatgggcctgccgctgcaacaggtgcaaaacgtgctacaccttctgtagaagcttctgcacggtgagcagtaccaaaagcatccattacaaacacatcacatagagctgcatatttttgtgcaagttcaggattatttttcttttcacccggattaaaacgaacattttcaagcaaaacaacttgtcctgcttcaacttcaaccccatttaaataatcagtaaataatttaacttcttgacctaatgcttcagttaaatatgcagccactggtgcaagtgattgttcaggctttggctcaccttccacaggacgacctaaatgtgaaaataccattacagcagcgcctttttctaaagcagcttttattgttggaagtgcggcacgtaaacgagcatcgctagtaatcacaccatttttaacaggaacgtttaaatcttcacgaataaggacacgtttacctgctaaattaaggtcagtcatgcgctgaaaattcatgtaaagctctctttatgattttaaaaacgcgccaattttaaatgattacatcaaaaaaggttagtttttttgcataaaagctgtagaaagccaaagttttgattatgatagaggtagtcatctaatatttcatccattatgtctattcatccagatccacaaatcaatcgtttaaatgttttaggtgaacccttagcaagctgttgttttgaccctattactggctacttccggaatggtttttgccatacagccgtaacagatcttggacaacatacggtgtgcgcccaaatgacttctgagtttttaaatttttcacaaaaagtcggaaacgatctgatcactcctctaccagaagcaggcttccctggcctacagccgggagacttctggtgcatttgtgtaactcgttgggtagaagcttatcaagctggtcaagcaccccctgttaaacttcatgcttgtcatcaggctgtattgagctatgttccattagatgtattaatggaatttgcagtgtaatgaaacaacccaaaattattttggcatcaagcagtcagacacgtaaagatttaatgaatcgtttaggaatcgaatatatctgcattagtccagatattgacgagagtccttgtggtgaaacgcatgccgatgatttagcaaaaagactggcatttactaaagcacaagtaattgcacaaaaaaatcgtgaagcaattgtaattggatcagatcaggttgcatggcgagagcatgctcctcatgattttattggcaaacccttaacaattgaaaatgccaaagctcaattagcagcaaactctggccgaatagtcttttttagtactgctttaagtgtgcagtgccttgaaaaaagttttgaacatacgcttgttgagcattatcaagttaagtttcgcaatttaagcgcgcctgaaatcgaaagatacgtcgacttagatctgcccttagaatgcgcaggaagttttaagtgtgaaagtctcggcattagtttatttgaaaaaatgataggccaagaccaaaccacgctgatgggtttacccatgattcagctttgtcagattttaagacaactcaatctccaaattccttaatatttattagcttatttataggttatttccatgacagaagctttaaccgttttaggcggtattactgctgaacagtttttaacagagtattggcagaaaaaaccattacttgtacgtaatgctatgcctgaaattgtgggtatgttagagccgaatgatgtaaaagaactcgctttagaagaccatgtaactgctcgtcttatccgtcaaaaagataaaaatccaaatgaatggcatgtaaaatcgtctcccttaactaaaggtgattttcaaaaactaccaaagttatggacacttttggttcaagcagtagaccattattcatttgatatagctgaattgtggaagaaatttccttttattccacaatggcgccgtgatgacattatggtgtcttatgcccccaaaggtggttcagtaggaaaacattttgacttttatgatgtttttcttgttcaaggatatggtcatcgtcgctggcaactcggccaaatgtgtgatgcaaacactgaatttgtacctaatcaacctttaaagttgctatcagaaatagatgttcattttgatgaagtattagctcctggcgacttattatatgttccacctggattatcacattatggcgttgccgaagatgattgtttaactttctcctttggtttccgtatgcctaatatttcaggcatgatcgatagaattagcgatcaatttgctactgatgaattacttcaaaatcctgttgtcgatattacccgtaagaatcctcctcaaattggggaaataaacacggaagagttggcttatttaagagatttagtgctagctcaattgaaaaattcaacagtacttgatgctgccctcatgtcttacatgagcgagcctaaatatccagacaatattccagaaccagatgaaatagaggttgaagacctaaatgctattttgtcagaagggtatgagctgctactcgaacctgcttcgcgtctactttatacagaacaaaatggcattttaaagttttggggtaatggagaagaattaccgattgtggaatcttttgccacccaactcaaatcgattgccgatgggaaaagcattcctttcaatagtgagcttaacaatacagatattttagaaaacattgttcaattattgaataattcaattcttatgttgttacctcctgcagagtaatactaactaaatatataaaaaggagaaattataaaatttctccttttttcttttataaatacatgtttaaatataccaatctttaaatcaaagttataaaggcccacttatagtaaaaaccaccttaccaaatcaaagaattaactactaaacatagctattaaattataaaaaaattaatgcttagcattgagttttgttcttttattatttttaaaaaacctatttttttctatcaataacagtcaatacaatgtaaaatttcgcgttcgtgctttttatttgtacactcgacctttaggctaatagcaaaatatttgtgtgaggctactaaaatatgtcaaaaaaagatgacattattaccactgctttaagactttttaattcatatagttataattctataggggtagatcgtatcatcagtgaatctggtgtagcgaaaatgacattttataaatactttccttcaaaagagaaacttattgaagagtgtttattattaagaaactcacttttacaaaattctcttactgcggcaatctctaaagaagacgaaaccaacccactagctcgtattaaagccatctttttatggtattcagattggtttaatagtgaagactttaatggttgcatgttccaaaaagccttagaagaagtattaaaacaatacccgtcaacacatcaaccagcaactttatacaaaatctggttaacacaattaatgcaagatcttcttattcaatatgaaattgaagagtctcgacctttggcattgcttttagtcaatattttagagggtatgaccattcaagctcaagttgagcatggttcagtaaaaattgatgactattggaagcgtgtagagaaactcattgaatttgaaaaaattgcacattaaaaaataaagcgtgatattattcttcttatcttgttgaatcttcttcttattcatcacgctgcgtctgaaagtcattctagcttagagtttgacattttttaaattatcatcccaaactagaatatacagacctgtctgtacatggtcgattataactttagaaaataaaaacacaatctttttttcttgcccttttatatataaatcagatttaactattgatagagagaaaaatagaatttattttctttgactttgtttcatttatacttaacaattacgcttctcacacaaagcaacacttttgacacaaaacaaatacaaattcttgttttaccttaataatgttatatatttatcaattacacttataaaccttttcaacaaaaacaattggattgattagttttgctacattcattttcttaagatcaatctatactatgccggccatattgatataggtataaagtatgaaagatggactccaaattgaagaaatgaaaaatgcggcggattcagtcgtaggaacattaaaatctttagctaacactgaccgtttattaattttatgtcacttagcccatgaggagttaaatgtctctcaaattgaagagaaaacacaaatcacccaacccaccctttcacaacaattgatgatgctacgtaaaagtgatgtcgtttcaacacgtcgtgatggcaagcaaatcttctattcaatcaaggatgataagatgcattcaattttaaatatgctttaccagttatattgcatagaataactgctctaaacttataaaattataataatattaatgtattcctgaaatatgcgatttttcaacttggtagctggtaattatccgagcaaagaggattgaaaattcgcgtagtttttctagcattccaatctattaaaaaacaaaaataacctctcctatttcttttttatatcttttctccctcttcactaatttttatggcaaataataagaacttaagcgttactggctgtaatataagcaaaacatcagataccaaactttaaccaatcaattttctttatttaaaaacaaatacttaatattaccaaaccttataaaactgatgacttgatataaaaaagcttaagattcacatcacttacgtataaaatactcagcttgttcaacctttagccatgaataggttaataaggcctttatatgcttgaattcttttctcgattaagcttagtcactaaaattattatcgccattattttagggataggcgtcgcactattatttccaaccgttacgccgtacttaagcttgtttggtgaactatttattaaagcattaaaatcggttgctcctattttagtctttgtactggttctctcatctattgccaacttccaagtcggtcatagtgcaaatttacgcccagtattactactctatgtagtaggtatgttattagctgcttttagtgctgtgatcgctagcttatcttttcctagtacgctttatctcaacactgtttctcataataatttgcaagcgcctggtagtctcgctgatatattaaaaaatctgcttttaagttttattgcaaaccctgttcaagcaatcagtgaagcgaactttattggtattcttgcgtgggcaattggtctcggcttagcaatgcgtcatagctcggatacaaccaaacaagtaatgcaggatgtttcacatgctgtaagcgctattattcataaagttattgcgtttgcacctgttggtattttcggtctagttgcagtaacttttgcagatgctggactagcaacacttgaaagttatgcacaattacttgctgttctattaggaacaatgctgtttgttgctctagtgattaacccaattctagtaggtttaacaattcgcggtaatccctacccattagtatttaaatgcttaaaagaaagtggtatcacagcgttctttacacgcagctcagcagctaatattcctgtaaaccttgatttagctgaacgtttaggcgtaaatccttcaactgcgagcgtttcaattcctttaggtgctactgttaacatggctggtgcagcagttacgattactgtacttactttagcaactgtgcatacgttaggaattcatgttgatttggcaacaatgattattttatctattgtagctacaatatcagcatgtggtgcatctggtgttgcaggtggttccctacttctaattccagtcgcatgtagcttatttggtatttcatcagaaattgcaatgcaagttgttgcagtaggtatgattattagtgtattacaagattcaacagaaacggcgcttaactcatctaccgatgttttatttacagccgcagttgatattcgctcaagacaaaactcatagagaacatgccatttcaaagtttaccaaactggttccaacttggcgccttcttactggcaataaatgccggaatgattaatgtattagggcttatcacccttttacatcaatcggtgtcgcatatgactggtaatgtcagtatgctagccatgagtttggtaaactggcagtttgaacacatcatatatttagtactagttatattatgttatgtatgtggatcattttacagtggttttattctaggcaatagccatttcaaattaggccgccggtatggccttcctttaagtctagtttcactatttatttttctctgttggttactgctgccttattttccaaaatatggactattatgggcttgtgtcgccatggggctacaaaatgcaatggtaagtcactataaaggaaccattattaggactactcacttatcgggtgtcttaacagatcttgggcttgcacttggttatatagcacgaggtttaaaagtagagaatcgccgcattattttgcatctacttatttttataggttttctatctggcggtataattgctgctttagttcacccttatttaaaattgcaatcatttttgcttccagcaattttaagcttaactctcagtatttcgtattgggcagtttactttcatagttcttcctcttcaaattcggattaagtcatggttaaaaatgccttacaagctcagttactcaaagctggtttagttgacaataaaaaagcgaaaaaacttaccaaacaagctcagcatgagcagcgtactggtcaaagcaatgaagcagaaattaaagctaatattgaaaaagctcaaaaagagaaacaagcaaaagatcaagctttgaatctagaaaagcagcagcaactcgaagaaaaagcattaaaggcttcaatcattcaaatgatcaagcaacacaaaattgtagattttgccggagatgtggcttatcaatttattgacgagaataagattaaaaaggtttacctatctcagcaagtttataatgcacttgttacaggcagtttagtgattgctaaagatcaagatcaatatgcttaccttcctaaagccttagctgaaaaaattgatcaaaaaatgaaaggatttattttgatcaataatgctgagaaaaatgaacaaactactgatgaagaagatccatatgcagcatatgtaattccggatgacttaatgtggtaactgttatgagcctttatcaacattcggataaaggctcatactgcttaaaataaatattaatattttatcatttattaaaaaaatttataaaaattacattcaagccaaattcattcaccacttcatctattattatcgatataatgaataaaacattttttgtctttacgatgccttttaggcttcttcccgattccaaatttatgtcttgactaaatcatgtcagttttagccaaagatatacaacataaactttgacgtgtatccacacacccaacagatcaataccttaattaagtttgatctaactgactttattgcaaattaaattgcgaaattttactaaagtagctgatgtataaaggtagtcattcatgctgaagtggtttgaaaaacttgtagatccttatccaaccaaaggtttggatgagcccttaccaacacgctttttcccatttgtttggcaagctactgaaggtgtgcgtccatatttattgctacttattatatgtacagctggtgcagctagctttgaagccctgctcttttcaaaaattgggcaacttgtagattggcttagtaatagtcagcctgaaagtttcttaagccaacatgcgtcaaacatccttattctcattagcgtgttatttgctaacattttatttgttaatattcaatctattataaaacatcaaattttatatagtacttttccaatgcgcttacgttggcgcttccataaccttttattaaaacaaagcctagactttttccataatgattttgctggtcgactttctgcaaaggtcatgcaaacagctttagcagtccgtgaattctggattattttaggcgacatgttggcttacgtcagcatttactttattaccgtaagtattgttcttggtgcaatctcacccacattacttattccacttatggtttggttagggttatttttattaagcgcatggttctttattccacgtttaagcaaagtatcacaacaacaagccgatgcacgcgctgtaatgactggtcgtgtaactgacgcctacactaatattcaaactgtaaagctctttgctcatgctgggcgtgaaagccaatatgcaaaagcgtcaatgaaagagtttatgaccacagtctatgcgcaaatgcgtctaggtactctttttgaagttagcattaatttactgtctgctgttttatttgttggggtaattggtaccgcagtttggttatggactcaaggtttagcagcgttaggcgtaattgctgctactactgccatgattttaaaacttaatagcatggctgagtttatgatgtggcatatgtcagcattatttgaaaatgttggtaccattcaagatggcatgcaaacacttggtaaaaaaatcaatattcaagacaagccagatgcaaaaccacttgcagtcacacaaggtgagatcgtatttaaagatgtgacctttgcttataacaataaaaatgtcatcgatcactttaatctacacattaaagcaggtgaaaagattggtatcgttggccgttcaggtgcaggtaaatctaccctcatccaattactgttacacttttatcatcttaaagaaggtgcaattttaattgatgggcagaatattgaagatgttacgcaagatagtttgagagcaaatattgctttagttactcaagacacttctctactacatcgctcagttgccgaaaatattaaatatggccgtccagatgcaactgatcaagatatgcaaagtgccgtgcataaggcaaaagcagctgaatttattcctcaacttgtcgacttaaaagggcgttcaggttatgaagcacaagttggtgaacgtggtgtcaaactgtcaggtggtcaaagacaacgtatcgctattgcgcgtgttttcttaaaagatgcaccaattttaatcttagatgaagcaactagcgctttagactcagaagttgaagcagctattcagtctagtttaaatgacctaatggtagataaaacagttattgcaattgctcaccgtttgtctaccattgctcaaatggaccgtttaattgttcttgatgaaggtaaaattgcagagcaaggtactcatgaagaattaattgctaaaaatggtatatacgcacaattatggaaacgtcaaacgggcggttttcttattgagcaaaaagtagtacagggtcaagattaatgctttatttagaagatttaaaaattggtgatcgttttatcagtcgtgagtatgaaattacacttgatgaaattaaacaatttgcaagccactatgaccctcaacctttccatacagatgaagagttagccaaagaagatccaatctttaaaggtattgccgctagcggatggcatacctcggcaattactatgcgcttatggactgaatgcatgcccattcatggtggactagtaggctcagaatctagtctacgttggccacgccctactcggcctggtgaccgtattcatgttgaagctgaaatttccgccattacgccatccaaaacaaaattggatcgtggtattgtaagctacgttacgcaagccttaaatcagcatggggatgttttacttatttcaacgacaaaaatcgttgtctttaaaaagaatgtttaatgaatcgttgatatgattgtctaacagtttttataaactcaaattatatttcatgacaagatgtgtaagaaatgcacgtagaaaattgatgagagcaacggaacgcatatgaaaattacctcagctcgtcaagatcaaggtattccaggagtctatggcttattgctattagatgtagtttcacgttggggatacaacgatgaaacattatttgctccttttcatcttactagtgagcaattggccgatcctgaatatcgtatttcaacacccgtagcaaatgagctagtcaaacatgccttaaatcttaccggtgaaagtacactgggttatcatattggcactcaaatgcgtatttccattcacggatttattggctacgcgataatgacagcaaaagatattacagaagcgattgctctcgctgcccgttttatccaattacgcttaccttttttacaattatatttttctactttcgggccaaaagccacattacaattgcaatgtgatattgagttagaacctcttcgtactgaaatcgttttaggtttaactattggtattatgaccatggctaaagcgattacgggtattgaagatttagcgggtgatgttgatttagactttccagaaccggaaggttttgataaatataagagcaaactaagcagtactattcggtttaaccagcctcatctaatctctagctttgacaaaaaatatttaggttttaagttagttaatgccgatccaatcgcaagtcaaatcgctattaaccaatgtgaagcggaactatctgctttaggcgaacgccgccgtctagccatgcgtgtacgtgatattttaagtaattctgaacaacattacttaagcatagaaaatgtagcagaatatttacatatgtcagatcgtaccttaaagcgacaattggcagccgaaggtacttcattttctactttagtagatgaagttcgatatcgtcatgcgacctctctgctttcgcgtacagattatagtcttgaacaaattgcagatgaacttggttactcggatgtcgcaaatttcagtcgcgcttttaaacgctggagcggtcgcagtccgagcaactggcgcaaagacccctatttataatgttattaaaatattggacacaagcttaaggagttgtcatgaaccatccttcagaattgaagtatgcacgtacacatgagtgggtaaaaattgaaggagaccttgttattacagggattaccgaccatgcacaagatgagcttggagatttggtctatgttgaaactcctgaagtgggtagccaagtaacagctggcgaacaagccggagttgttgaatcagttaaaactgcttctgatattcatgcccctgtctctggtacagtagtagaagttaatactgatcttgaagatgatccggattttgtaaatgaagatccatatggcaaaggctggatttataaaatcaaaccagacaatattgcagatgttgaaaaacttttaacaaatgcagagtatgaagctggtctataatatagatatagttttaataaaaaaaccagtttagatttaactggttttttatatatgtatagatcagatttaaaaaccaaattcatgaatgggtcattcatatgacaaaacttgtggtattttccggcgccggtatgagtgcagaaagtggaattagtactttccgcgatagtaatggtctctgggaaaattatgatatacaacaagttgccactcccgaagcgtgggaaagaaatccagctttagttcaacgcttttacaacgaacgtcgtaaaaatattttagaagcccagccgaacgaagctcatcaatatattgctaaactacaagaccattatgatgtacaagtcattacacaaaatattgatgatctacatgagcgtgctggaagccaaaatgtcttacatctacatggcaatattcgactagcgaaaagttctgggccagatgcacaatatacaactcaattttatgaagttaatggttggaagctcgatttagaacaggacttttgtctaaatggttacccgcttcgacctcatgtcgtttggtttggtgaagctgtacctgcttatgaagaagcaattcgtttagtacaaagtgctgatatttttattgtaatcgggtcaacattaagcgtatatccagttgccgccttggtccatgagattcctcattattccaaagcgtattatatagatccccaagcagatcattctcgtgttccacctcaatataaattattaaatatgacggctacagaaggtatgcacgagttatttaatcaattgacgagttaatattcctcttttgatattctttttttcttattaaaaccatttttttcgcgtaaaattgatgagaaattattcatctaaataataacttttcttaaaagacatcctgtcattattatttttgtaactaaaaaactgaatttaactcttagattttttaaattattagttttttaataagttttgatattattttaaattcataattaattgattttattaaactaaatttaatatgtaatcaaagttacacttgtttacataaagatacataaaatacatcacaaagataacagagcaaaaaaattcttttatggttgaatctcaacctcttgaaatgccgtacaagaaaacagcgacctggattaggttacaatcacggattatggatataaggacacacatccattatgagttattttgatcccaccctcatcatgtttatggtgtacatcgtagcaatggtacttatcggcttatttgcctaccgtgctacaagcgacttctctgattatattcttggtggtcgtagtttaggcagtttcgttactgcattatccgcaggcgcatcggacatgagtggttggttactcatgggcttaccaggagcgatttatctttctggtttatctgaagcgtggattgcaattggtctaattatcggtgcttggcttaactggttactggttgctggtcgattacgcgttcatactgaaatccaaaataatgcactcactctgccagattattttacaagtcgatttgatgaccagaaaaagatacttcgtattttctctgccgttattatcttggttttcttcgctatttactgtgcttcaggcatggtagctggtgcccgtttatttgaaaatttattcggtatgtcatataccaccgccatctggttaagtgctattgcaacaatcagttatgtttgtattggtggtttcttagcaattagctggactgatactttccaagcgggcttaatgatttttgccctcttgctcactccaatcgtgacttacctcgcaattggtgacacaactcagtttgtgacgcttattgaaactgctcgtccacatgcgtttaacatcatttctgatttaagtgtggtggccgttttatcttccatggcttggggcttaggctattttggccaaccgcatatccttgtacgtttcatggctgctgactctgtaaaatcaattcctgctgctcgccgtatcggtatgacctggatgattttatgtttagtcggtgctgtcggtgctggtttctttggtattgcttacttccagcaacaccctgaacttgcaggtgtggtaagtaaaaaccctgaaactgtatttatggaattgactaaaattttatttaatccatggattgtcggtatcattctagctgctattttagctgcggttatgagtacattaagctgtcagcttttggtatgttcaagtgcactaactgaagatttgtacaaaggcttcattcgtaaaaatgcatctcaaaaagagcttgtatgggttgggcgtatcatggttcttgcaattgccgttctagcaattgtgcttgcgggtaaccctgacagtaaagttcttggccttgttgcttatgcttgggctggttttggtgctgcatttggaccactcatcatcttgtcattgttctggaaacgtatgactttagaaggtgctttagcaggtatgatcgtaggtgctgttgttgtgatcggttggaaaaaccttttcgcaagcactggtgtttacgaaattattccaggctttatctgtgcatttatcagcatcatcgtagtaagcttgatcagcaaagcgccaaactctgatgtgactggtcgctttgagcaagcagataaactctataaagaaagtacataactcattgaaataaacaaaggggcttcggccccttatttatttttagttttgattttaatttttgaactatctttcacaacttgcatcacgggataactacgagtctcttttacaccgggtaattgccatagcacttgccctgcgatacgtcgaaactcctccatacttccactgcgtaatttaattaaaaaatcaaatcccccactgaccatatggcattcaacgatttctggataatgcacgactgcgtcaataaactcatctaaaacattaggtgtggttttatcaagtaagacttcgacaaaaaccaaaaaatttgcatttaacttaactggatttaatttagcttcataacctaagatgaattcatctttggtgagcttctgcactcgtgccataactgctgttggagacaaattgacgagttcagctaatctgctgttggaaatacgcccatctgtttgaagaatatccaaaatttttaaatcggtgcgatcaaggcttaataatgggccattcatctgaattttcctctaaaaaatgggcaaaatatagtgagttattcggtgtttcttctgtaatgataaattatctaaacctctctactcaagatgagtttacgagagctggttggcggaaatagatatgaacacaatggatacttttcatcaaatggataaatctcaccaaggctatatcaccgaattcaacgataaaagtgagtttgaacaacgcattaatacagcttggcgacgtgccgaacctgaagctgtagaagagctattacaagctgctgcggtatctgatgatttagatcataaaatttatgaccttgcatttaaccttgcccataatttacgtgaacgtaagacctcttcaggtaaagcaggtattgttcaagggttattacaagaattctctctttcttcacaagaaggcgtggctttgatgtgtcttgctgaagctttgcttcgtattccagacacagcaacacgtgatttgctcattcgcgataaaatcaatcaaggtaactggaaagaacatgttggccaaagcagcttaatgtttgtgaatgctgctgcatggggtctcatgttaactggtaagcttatggaaacaccaaagcaaaccagtctttcaagtgtacttactggccttttagcacgtagtggccgtggcattattcgtaaagcagttgacgttgcaatgcgtatgatgggtgaacagtttgtgactggtgaaaccatcgaagaagctgtcgaccacgcaaaagtacttgaggataaaggtttccgctattcttatgacatgttaggtgaagctgccttaaccgaccatgatgctgaacgttactttaatgattacacacaagccattcatgcaattggtaaagcgtctaatggtaaaggcgtatatgatggccctggtatctcaattaagctttcagctttacatccacgttaccaacgtgcgcaaattgaacgtgttcacaaagaactctacggcaaagtatttgaactcgctcgtttagctaaacagtacaatattggtttaaatatcgatgcagaagaatcagaacgtttagaaatttctcttgagttacttgagcgtctctgttttgagccagaacttgcgaactggaaaggcattggtttcgtaattcaagcttaccaaaagcgctgcttctttgtggttgattatattattgaccttgctaagcgtagccaaaagcgtctgatgatccgacttgtaaaaggcgcatattgggatagcgaaattaagaaagcacaaatcgaaggtatggatgactaccctgtcttcacgcgtaaagttcatactgatttgtcttatatcgcttgtgctaaaaaattacttgcagcaccagaatttatttatccgcaatttgcgacgcataatgctcaaactttagcaacgatctatcatttagcagatccaagcaaatattacgctggtcaatatgagttccaatgcttacatggtatgggcgagccgctttatgaacaagttgttggtccacgtgaacaaaataaattaggcgtgccatgccgtatttatgctccggttggtaaccacgaaacattgttagcttatttagtccgtcgtttacttgaaaatggcgcgaatacttcatttgttaaccgtattgccgataaaactcttaaagttgaagatcttatccagtctccaatttatgatattcgtaatgcagctaaacttgaaggttcggttggtttaaaacatccatcaattccactacctttagatatgtacggaacgcttcgtaaaaactctaaaggttatgacttagcaaatgacaccccacttgcagctttagatagcacagctcaagaattacgtaatcgtatttggcaaagccatccgttgttggctaatactgattctttagaacaaggtcattctgttgcaattacaaacccagcacaaaatgatgaaattgttggttatgtacaagaagctgatcttaagcatgtcgaaatcgctcttactgcagctgaacaaacccagtcagaatggtcaaatacacctaaggatcaacgcgctcaatacttaaaacgcgcagctgacctcatggaaagccgtattcaagagttgatggtattactttgccgtgaaagtggtaaaacttatgccaatgcgattgcagaagttcgtgaggctgtagatttcctacgttactatgcaacccaagttgaaaatcttcctgcaaatacagttattcagcctttaggtactgtactttgtattagcccatggaacttccctcttgcaattttctcaggtcaaattgctgcggcattagtcagtggtaactgtgttattgctaaaccagctgaacaaactccattgatcgcagcccaagcagttcagattttatgggaagctggtattccacatggtgctgtacagctacttcctggccgcggtgaaacagtaggtgctcagctcagccaagatagccgtatcgatggcattatgtttactggctcgactgaagttgcaaaaattttacagaagaccgttgcaaaacgtttatctgaaaatggtcaatctattccactcattgcagagactggcggtcaaaatgcaatgattgttgactcatctgctttaactgaacaagttgtattagatgttgtaagttctgcttttgatagcgcaggtcaacgctgctctgctttacgtattttatgtgtacaagaagacagtgctgcaaccgttattaaaatgcttaaaggtgcaatgcaacagttgatcgtaggtaaccctgcaattttaaaaactgacattggtcctgttattgatgacgaagcaaaacagacgattgaccagcacatccagaaaatgaaatcgaagggttatccggtacatcaattgatgtttggtgcaacaagccaaacagaattagataaaggaacttttgttgtgccaacagcaattgaacttcctaatcttgatgacttacaacgtgaagtttttggtccggttttacacatcattacctataagtatggtgaacttgagcaactcatctcaagaattaatgcgaaaggttatggtttaaccatgggtctgcatacccgtattgatgaaaccatccaaaccgtaattcaacatgctgaagtgggtaacctttatatcaaccgtaatattgttggtgctgttgttggcgtacaaccattcggtggtgaaggtttatctggtacaggccctaaagcgggtggccctctttacatgtatcgcttaatgcagcattgttctaacaaagtattagcaactccatttgcggtaaaaaatgagcaaaccgtttttgaaggctttacccgtgaggtttatcaaagcttacaaaactgggcgaaacaacatttaccacaagcaaaccgtgaaattgaaccttttggtgttggtaaattttatgagttacaaggccctactggggaaagtaaccaatatattattttgccgcgtcatcgtgttctttcaattgctgatacagaacaagatcaattgcatcagttacttgcaatctttgcagttggcagccaagctgctgtaatgccaaatagtccattattggcaaaacataaacaaacgttgccaaaagatgtacttgatgcgattactaccattaaaaacatcactacagatgattttgatgcagttttacatcatggcaaccgcgaagagatcttctcattacagcaagaaattgctagccgttctggcgcaattgttggtattactcatgttgaaccaaatgagtcgattccacttgaacgtttggtaattgaacgtgcaattagcgtaaatacagctgcggctggcggtaatgcaagcttaatgacaatgtctgaataattaagtaattttctaaaaagcccaaattacgatatttgggcttttttgtttaataaaataatctattcttaaatatataaattttatcaatttgagtttttaataatgattttttttgaaccagaacaataccaaaaaagatgcactcagctttttaacttataccgaaaacaaatttccgctctgctaccatctgcccaaattgagcatataggttcatctgcaatacctaatgcattctcaaaaggtgatttagacatttatattgaggttctacccgatcaatttgagtttgcaatagaacagttaaaaacgcttaattttatagaaaagcaaaatacattaagaacaaatgagctttgcatgctcgattcactcaacaacgatgatgttgcctttcaagttgtagtaaccggttcaatattcacatttttcttaacctttagagataagcttatagcttctccaacattagttaatgaatataatcaattaaagttagagtccacccacttagatcatgaccaatatagagcagtaaaatctaattttattgaacgcgttttaagtcactcctagtgtaagtattttttctttatgaataactaactaaaattggctcctctaagctcaattttttggtaccattcaccatttgattctgtctaaattttctttgtctatgacttcttcttatcatcaacaacttcaagctaaaattgatcgcattactactcaattttctgaatttacaccgcctacattagaagtgtttgaatcgcctgaacaacatttccgtatgcgtgctgaatttcgcatctggcatacagaaaatgatatgttttatgccatgtttgaacgtaatgacgatggcaagcaaaaaaccgttgtacgcatagatgagtttcctattgcagataaaagcattaatgacttaatgccacttcttttagcagaacttaaagccaactctttactttctcagcgtttatttgaagttgactttctcgcaactctaagcggagaaatgttagttaccttgatttatcaccgcaagcttaatcaggaatgggaacaagaagctaaagcacttgctgaaaaattaaatattaaaattatgggtcgtagccgaggccagaaaattgttattggtgatgactttgtggtagaagaatttgaacttttaaaccgttcatttaaatacaaacaaatcgaaagtagctttacgcagcctaatgcacaagtttgcaaaaaaatgctgcaatgggcatgtgatgcagctgaaggatcaaaaaaacacctgttagaactttattgtggtaatggtaatttcacacttccactctctttaaaatttgaaagagtgcttgcaactgaacttgcaaaatcatcagtttatgcggcgcagtggaatatcgaacagaaccaaattgataatattcaagtagctcgcctctcggctgaagagttcactcaagcctatcaaggtgaacgtgaattccgccgtctacaagaagcagatattgatattcaaagctacgacttcgatacagtattcgttgatcctccacgcgcaggaattgacgatgaaactttaaaactattgcagagctttgaacgtattatctacatttcatgcaaccccaacactttatatgaaaatttaaaaacgctcactcaaactcatcgcgttactaagtttgctttatttgatcagttcccttatacgcatcatgtagagtctggtgtcttacttgagaagatttaaacaaaatttttcaatgtaaccctattttataaggagattaaatatctccttatttttcaaggtgttttaattaagtatttaaatttaaaaaaaatatcaagtcatctattcgtcataatttcgtttaactcgaccattactatcgaaaattctctagttcaactggtggatttatcacatatagagtcttgtattttaatttatattggctatatttcgagctatgttaggttgtatatgaaggctctatgagtttttggcaaaagctgttcttggcagatcaacagcataacgagcataaaaaccaaactgcttgtgttgaaaatgactgctcatgtaaaactaatgaacaacttctaagtgcgcttgcgcaagcgactgatgaagatgtcattaagggaatcaagaaagttcttatttcccgtggttatagccgaaaagagttaaatgaactcactcaaaaaccatctattcattaattaaaaagccagtcttgtactggcttttttatattttacttgtgtctacaatctgcctgatccacccatccaataataggccccatattaaattttttgtcatttcgattattcttatgcaaatataaactagagatagaaccgtcaaggtatagagcttgctcgacttcaagatttttttggaagaactgagcaaaactatagaaattcactctatttttagatatcacaaaatacaatttattattttttacacctaccccattacgtattttctttgaatcgctatttgctaggaataagggatttattttgccattaatcactaacatagggccggactgcgtagcataatcgggttgaaaaacttttgctttgtattgttcagttgtcaatataacagcttgtttgtcattccatgctagaactccattaggctgcaaaaagaagtttccccagcctttatcttcatttaaaggttggctctctcgtccgttttcaatatatagtcctactggagaaaaaccggaatggaacatgcctccattcatcgcaaaagtaagctgttcacatgctttaagttgatattgaatattgtcgaaacttttataatattgatcagtttgcggatttttcagaaataagcgtaattgttctaaattagaaatttcaattacttcaaactgatcatcagtagtatttctaatctgccgatactctagtgctaaagcggattgtgtaaagattatgaagttcacgatacacagtactagtattttcattaatgccaaaccttagatgtcattttattttcataaagacactttattaaataaaaatgtttgaagtgatatatacccgaaagtcgcttattccacctaatcaatacactagaacacaactatattcgttataatagtcacagctttgtataaaagtgattaaactttattggatcagcgtgaatatgcaacaaacaaataaacgctaccctttaggggctcatcttattgtaaaacatctcggctatagccatcatggtatctatgctgggagaggtcgagttattcattattcaggcctcgcacatttcatcaaaaaacggcccattgaaatcacttccctagatgccttttctcatggcaaaaaaattcatgtacgttcttatgatgcaccacgctacagaggaaaagttgttgtacgacgtatgcgttcacgtatgcatgaaaaccattatcatttgattattaataattgtgagcatttatgcagttgggcgattactggtatcgaaagtagtactcaagttgagcgaatgatgcatcgtttaaccaccattggttacgtgagctcaatcatgagctatatgaatggcatgatgctaaccgtagcaaccacctgctttgctcttgttctttatattaaaaagaaattacgtgatcaggcaaaaatgaatattccgacttatcaatttctaagagaaaaagccgaaaaaagaaatatagacccaacctcacctttagtctttatagaaccagataaaaaagaaactatctaattaaaaaagtcctcaagttgaggacttttttagaaaacttacaacttattttttagctgcactagccgcagttgcttcagttgtaatgtttacagtgatcttatcacccacgtttggtacatagttacctaaaccaaagtcagagcgattgaacgaagttgtcgcgttaaaaccaatcgctggaacttttgccattgggtgctcgccttgcttatttaagacagcatcaagtacaactggcttagtgatacctttaacagtcaaatcaccagtaattttaaaatgttttttatctttagtttctactttcgtacttttgaaagtaatgtttgggtatttagccgcattaaaccaagcttcttcttggaactctttatctaaagcaggtacattggtattcacactgcttaaaggaatggtcacatttacagatgagtttgctggtttagcattgtcaactttaattacaccttggatgtccgagaagttagcacttggggttgaaaaaccgaagtgattccacgagaaaacagtagctgtatgtgttggatcaattttatagtccactggtgcagctaatgtaactgtacttgccaatgctactgctaaaccgaagcttaatgttttaagatgcatttttcgtatcctttattgatatagtcgttagtgtatacatcaagtaatttaattcactattctttataaaacgatatgtttcatccatgcaacaataaaagcgttacagttgttattcaaaaaccatattataaagtatagatattcttctattcgaagctttcagatttattaatttttactacgattttattgataaataacaaggtaaaacatggttaacactgcccaagcacaaagtacttctactccttatcgagtaacgcttaccgatccttcaggccatcaatggtttgcagatgaacccaccgataaaggtggacaagatacagctccaaatccggttcagcttttattatcggctttaggagcttgcactacaattacactagaaatgtatgcaaatcacaaaggcatcaaaattgagcatgtacaagttgatttagcattaaatccaaatggtgatccagaagcaggtcaaaataatattgagcgtaaaattactctaaaaggtgaatttactgaggatcagcataaaagattattaaaagttgctgaaaactgccctattcataagcttttaacgtctaatattacgatccaaactgaacttaacatttaaatagctcataaaaaaagcgccccaatcgggacgctttttattctgctcaaaagattaagcagttaactcttttaccgcagcaactacagcctcagttgtaataccgaagaattggaacaagtcttttgctggtgctgactcaccataagttgtcataccaattactttgccatcaagaccaacaaacttccaccagtagtcaacatgagcagcttctacagcaacacgtgcacgaatatgagctggtaatactgcttcacgatatgcagcatcttgtttcatgaactcttctgcacatggcatagaaacaacacgaacaccttcaagttgagcataagcttccattgctaaagaaacttctgaaccagtagcaataataattgctttcaactcacctttctcttgagcaagaacataaccaccttttgccgcattttggatttgctcttcagtacgcgtttggaatggtaagttttgacgagagaaaataagtgctgtagggccatctttacgctctaaagcagatttccacgcaattgctgtttctacagtatcagcaggacgccaagtatttaagtttggtgtgccacgtaaagaagcaatttgttcaattggttggtgtgttggaccatcttcacctaaaccgattgagtcatgtgtataaacatgaatcacgcgttgcttcattaatgcagacatacgtaccgcattacgtgcatattccataaacattaagaacgttgcaacgtaaggaatgaagccgccatgcaatgcaacaccgttagcgattgcagtcataccgaactcacgtacaccataatacacgtagttaccagccgggttttcttgaacgccttggcaacctttccaaagtgttaagttagaacctgccaagtccgcagaaccacctaataattcaggtaataaaggaccaaatgcttgtaatgtgttttggctcgctttacgagttgctacagtttcagctttagcatttgtttcacgaataaatgcatctgcttgagctgaaaattctgttggtaagtcaccgctaatacgacgaagtaactcagctgcttccgttggatattttgcttgatattgagcaaacacttcattccaagctgcttcagcttcattaccttttgctttagcatcccatgcagcatatacatcagcaggaataacaaatgcttcttcagtccaacctaaagcttcacgagttaaggtaatttcatctttacccagtggtgcaccgtgacagtcttctttaccttgcttgtttggagaacctaagccaataattgttttacaaataataatcgttggtttttgagtttctgctttagcttcaactgttgcttgacgaatcgcatcagcatcatgcccatctacacgaagaacttgccaaccataagacttgaaacgctcttcagtgtcatcactaaaccagccttctacttcaccatcaatcgaaatgccgttgtcatcataataagcaatcaatttaccaagctgtaaagtacctgctaaagaacatacttcatgagaaataccttccattaaacagccatcacctaagaaacaataggtaaagtgatcaactacttttaagtcatctttattgaactgagcagctaaagttttttctgctaatgcaaaaccaacagcgttcgcaataccttgacccaaaggacctgtcgttgtttcaattcctggagcataaccatattcagggtgaccaggagtttttgagtgcaattgacggaattgttttaaatcttcaattgaaagatcataacctgttaaatgaagcaaagcatattgcaacattgaaccatggccatttgataaaacaaaacggtcacggtttgcccattgtggattatttgggttgtgatttaaaaactcgcgccagacgacatcagcaatatctgccatccccattggagcacctggatgccctgagtttgcctgttgcacagcatccattgccaatacacgaattgcgtttgcaatacgacgttcgtttaaaggggtcgtcatagatcagaatccaattttaatagattgatgaaaagaagaagatgaataaccattcaatgccgctatattgtcttaaaaaaacgcctaggggtaaaccccaacactgtatatttctttatttttaactatttcttggttactcaaaaaacatttagattcttaagctgtgtaaaacaatagtatttatacttatttccatactcaacgattgtaagcttcttcctcttaatcaacatatagagttgtatttattttctttatttatagctttcacttcatagtctaaatcttcttgattaatatttaacaaaatcaaatgtttaaaatttaaacattttattaaaactctaatataaaaatgattaattttcatctatctatatcaatttccctgatacacatatcaattaaaacatagtagaaatgaaagaaattcatgctttttagtcagtatgaactggtcctcaagctcaagtcgatgtaacatattatgtctttttgaaataaccaagataggactttcatgcgcgagtacgctgtttttacctcggaatctgtaagcgaaggtcatcccgataaaatggccgaccaaattagcgacgctattttggatgcaatcttaaaagaagacccatacgcacgtgttgcttgtgaaacactggtaaaaacaggcgctgttgtacttgcaggtgaaatcacaacaactgcgaatattgatgtagaagctgttgttcgccaaactgttaacggtatcggctatcaccattcagatttaggctttgatggttcaacttgtgctgtaatcaacatgattggtaaacaatcaccagagattgcacaaggtgtagaccgccaaaaacctgaagaccaaggtgctggagaccaaggtttaatgtttggttatgcaagccgtgaaaccgacgtgcttatgccagcccctatttcttatgctcaccgtttaatggaacgccaagctgaacttcgtcgttctggtgcattaccatggttacgtccagatgcaaaaagtcaggtaacttttgcttatgaaaatggcaaacctgtacgtttagacgcagtagtactttctacacagcatgatcctgaaattactcaaactcagcttaaagaagctgtaattgaagaaattattaaaccgatcattcctgctgaaatgttccatgcagcaactaaattccacattaacccgactggtatgtttgttatcggtggacctgtgggtgactgtggtttaactggccgtaaaatcatcgttgatacttatggcggtatggctcgtcacggcggtggtgcattctctggtaaagatccatctaaagtagaccgctcagctgcgtatgctggtcgttatgtagctaaaaatattgttgctgctggtcttgcggacaaatgtgaaattcaggtgagttatgcaattggtgttgcagagccaacgtctatttcaatcaatacttttggtactgcaaaagtttctgatgagttaattatccagttagtacgtgaacatttcgatttacgtccgtttggtattactcgcatgcttaacttaattcaacctatgtataaacaaacagctgcttacggccactttggtcgtgaaggttcagatactgcatttacatgggaaaaaactgataaagttgaagcacttaaagatgccgcaggcctttaagctgattatattaaaagcccgctcttcagcgggcttttttattatttttgtatttgattaaaattaaacaatagccccttcaacatacattatttaaaggcatgaagtgagtattaagcaatattattgttttgtgctcttatcaccttcatttaatacatctaacagagtcgattgcacaggtgtatcttgatgattctggatataaagatgaacaactttgaatacgacaacaactgctagacaagccatcacacaaaacatccataggccatatggactacgaatatggtgtgaaccgcaatatggacatgatttatcagttgatgccacaactttgtcgcaacaagcacaatgatattggtatagcataggtaaccctccttccctcacttcaaccgttgttgttttaataggtttgctacatttttaaatttatacatcctttatatttatcctatgtgaaatgaaaagataattcaatctgaatgaacaatccgttcaaatttcaaatatttaatttatacaaagagatagactaaatattatttttttagcactatttttcttattttgatattttgttgaatttgttaaaatagaaacatattttattttccaggcgaatttatgacacagctcattaataaaggtggctttcgtgaaagagccaatagaagccaaaaatatcaacaatctgaaaacaagcaagtagctctgccttcaaacaagtatcaacctcaaactaagctccaagataatcaaaacgagatgattcaagcaaaagcagttatttctgaaacttcagatgattaattgttataaattaaaaagggcctaaatcttttagatttaggccctttttgtataatagattaattaatctttatttttatgctcaattttcttgtggtctggagtaacttctctcgcttcgccatcaataatactagaatcatgatattggctaccaccaccttgttgattctgcatatcctgcatttgacgcattaaatctgcaaatgggttttgaccagcacctgcaccacccatgccgcccatcattttattcatcatggcttgctgacgttttgcgagtgttctcattgcaatattacgaaacgcagtttgtacgcccggaataagaattaagagcgctaatacatccgataccaaacctggcaacattaataaaaaaccagcaaaagcataagctaattttttagtcacagtcggatcattacccaattgtccagtcatctgcatttgttgtaattgcggcataataccagccgtactattacgaataagcgttagaccaataaagaaagcaataatgaaccagaaaaacacataccatccactgatgaactgtgctacaccaatccatacggcaatttcaacaatcgcgcccagaaccacaataagaagtaaattcatgtaaaactttatctatctcaaaaagaaaattcattgcagttgttactacttaactaaactcatccatttttcatttgaaatcatggattaaatttagttgcaaagcttagacaatgtttttgttgtaacctaaaatcatagctaaactaaggttctgcaatactataaataagactgattctaacttaataaaacagtcatactctatcattaatgagtgctataacaactttatcaagtgttttttctacaagattgcaattttttcatgaattggccgatacttttatctattagcagcttttttataaaatttaacttacatttttgatatctaataattgatctactcaagttacattaattagctaaacttcaaattcaatcttataagtcttatgaacattaaagcactcttacttataacaagcgctatttttatttcagcctgctcaccttatatagtgactgctaatccaaatcacagcgcttcaaaatctgatgtaaaagcagagaaaattaaaaatttatttaacgaagcacacactacgggtgttttagttatccaacaaggccaaactcaacaaagctatggtaatgatcttgctcgtgcttcgaccgagtatgtacctgcttcgaccttcaaaatgcttaatgctttgatcggccttgagcaccataaggcaaccaccacagaagtatttaagtgggatggtaaaaaaaggttattcccagaatgggaaaaggacatgaccctaggcgatgccatgaaagcttccgctattccagtttatcaagatttagctcgtcgtattggacttgagctcatgtctaaggaagtgaagcgtgttggttatggcaatgcagatatcggtacccaagtcgataatttttggctggtgggtcctttaaaaattactcctcagcaagaggcacagtttgcttacaagctagctaataaaacgcttccatttagccaaaaagtccaagatgaagtgcaatccatgctattcatagaagaaaagaatggaaacaaaatatacgcaaaaagtggttggggatgggatgtaaacccacaagtaggctggttaactggatgggttgttcagcctcaagggaatattgtagcgttctcccttaacttagaaatgaaaaaaggaatacctagctctgttcgaaaagagattacttataaaagcttagaacaattaggtattttatagagttagtttatagcccagttcacttttaccattttgatctgggccattgctattttaaaactgataatctatccatccactggttcaaatggagtattcaaaattagttggtaaaaagcagcgtcaagccattgcccaaatttaaagcccacttgtttaaaagtaccagcgtgggtaaagcccattttctcatgaaggcctatactggcttgatttgtcgcatcaatacaaccaatgagcacatgaagttgagcctgttgagcacgttgaattaacgcttgcattaaaactttacttagaccacagccacgatgttcatgatgaatatagatactatgctcaaccgtatatttataagctggaaacgctctaaatgttccccaactagcaaatcctaataacttacctaactcatctactaccccaatgacagggaaaccattttctctttttaccgaaaaccatgttttcattgaatcaagtgaacggggaacatagtcatacaatgcggtagagttaacaatcgcatcatttagaatttctaatattgctaccgcatgctctgcttcattacaatcaattaaacggaaattagaatcgagggaatagttcataaagattccttaagagcgggcaccagttgattagaaacgactaaaatataacgagcaacttgagctgaatgattactgtatatgacaggttgatctaattgcattgccaagcaatccccttgacctaatgcataagaagtttcacctaattgaatttcaattttcccttcaacgacccaaagctgctgctgtaccactctagagctttcattagtttcataagtaattcgagaatgaggcggaaattcaatttcaacaatctggaagggtaattttaagttcggaggtgaaactgtacggcgtatatagccagtttccggatctcgccactcagcttgttcattccgacgaataagcggttgagatgatgaattccctgcttcattcgtaaaaatttgagttaaaggtacttcaagaccatttgctagtttttcaagaacaactgccgtaggactcgtttctcctctttcaattaaagaaatagctgaacggctaacttggcaacgggcagctaatacatctaaagtatatccacgtgctaaacgcagctctcgtattcgatgtgcaatccttatattgatatcatccattaaagaagctcaattccatcattatagataagtattccattaaaatagaattacatcaaatgatttcaaactcttcattatgaatatatggaaaattgggtggacaatataaatctttaggattaaaaaccgaaaaataaccattcatagcagcattctttaaattactcatgcagaaccgatttggctatgtaacaataccctctaaactatttaagtaagtcttcacatgccattgattattggaattgatccaggttcacgcttaacaggttacggaatcattgaaaaagatggtagtaaactacgttttgttgatgccggtacaatccgaacggaaactcaagagatgccagagcgcttgaagcgtatttttgctggtgttgaacgaattgtgaaatttcatggtcctactgaagctgcggtcgagcaagtctttatggcacagaaccccgactctgccttaaaacttggtcaagcccgtggagctgctatagccgctttagtgaatttagatttacaagttgcagaatatactgcacgccagattaaacagtctgtagtgggatatggtgctgccgataaagaacaagtacaaatgatggtgatgcgtttacttaacctgaccattaaacctcaagccgatgcagccgatgctcttgctgctgcaatttgtcatgcccacgcttcaggaagtatgagcaaactaaccgtcttgaatgccttaggtggtatggctcgtggacgaagtcgctctagtagccgtagacgctaaagttttattgtttattgatttactacttgagtaattgcttgattcatctcataagcttgtaaaccgcgcatgccttgtttggcaagttggtcacctgcctgagcatggagagttacgatctcatgtagggtaactgctttgtggaactgggcttttaagcttgcaatcatgcccgccaacacatctcccattccaccagttcccatacctgcattaccttgcgtacaaatatacaagttatcttctaaaattaagctgcctgctcctttaagcacccactggcctgcatatttttgctgcaacgcataaatcgcagcaattctgtcattttcaatttgccaagtagaacaactaagtaatgtagcggcctcccccggatgaggtgttgcataaatatgtaaactcaatttttcaggctgctttgcgagaaaccatagggcatctgcatctaatacaacttctaaatgtgaagtctgatttaaataattaaaccactgttgatagatttggagtgcccactcatcacggcctaatcccattccgaaacatactgcatcaacctgagataaaatttctttaataccgttttcatcgaaatcattaatatcacgcagcataatattaggagctcgcgacaaaatagcctgatgatggttgcgatgacaaactaccgtaaccttgcctgcccctgcatgaaaagcagcttcagcagccataatgacggccccgcccatttgctcatgtccacctatcaccaaaacatgcccataacttcctttatgtccaaaagccaaacgtttaggaaagttgatatgtgttggcgtcaagtaagcaagaggtttcagctcttggtctattggtattaaattaattaaatgaatttgtcctgcatattctttaccttggcctgtaaacagtcctgctttaagccctaaaacagtaaatgtatgatcagcccgtattgcacaaggtaaagtagagccagtatttgcatgtaaaccacttggtatatcaatcgaaatttttagccctgcttgcccattaaattgttgaatagcatgttgccaataaccgtttaattcacggtttaaaccaatcccaaacaatgcatcaatatgacaatcaaatgtcccgttgatctcaaaaccttggtgtatttgaacatgattttctttcgcaaaatggacagcgtggtgtaaatcagctgactcgcccaactcagccgcaaatattccaacctgaaacccagcttgtttgagatagcttgctataaaatagccatcaccagcgttattaccctgtccgcaccaaacagcaatattcttaaaattttgtttttgaaaaagtacaatgagttgttgagtgattgaccaagctgcttgttgcattaggcctaatgaggagttttgcgcagcaaaccaacgttgctcccatgcctggatatcttggctatggtaaactaccgcctgcatattcttatcctcttgcatttttcggtttatgacatcttccaacacatcacgcattgcagtgcaacaaattgatccacatgaattaaaagcatggatcaaagctcaagcattagacttgggttttgctgattgtgtcattgccaaaccagatgctcaagagcaaatgccacgttttttagaataccttgaacgtggttatcatgcagatatgacctatttagaagaaaatctggaaaagcgagcagatccaactttattggtgcctggaacaaaaagtattatttgcgtacgtatgaattatttggtggaatcaccaaaaccacgatatgtacccttcgaaccaaactctgcgattattgcccgttatgctcgtggtcgtgattaccataaggtgatgcgtggcagattaaaaacgttagccacacgtatccgtgaaaaagtgggagattttgaatcccgcccttttgcagactcggcacctatttttgagaaatcattagctgaaagtgctggaatgggctggacaggtaagcatactttactcattcataaaaagtcgggttcattctttgtcttaggtgaactatttacatcactcgacttaccttttgatgaacctgctacttctcactgcggttcttgtagtgcgtgtattgatatttgcccgacacaagcgattgtcgaaccttatatgttagatgctagacgctgtattgcttatctcaccatcgaatataaaggaatcattgcagaagaattacgtgcaggcattggtaaccggatatttggttgtgatgactgccaattaatttgcccgtggaatagttttgctaaaacagcatctattcccgatttcaatcctagacatggtttagataatattagtttgcttgatatttggcagtgggacgaagctacttttttagccaatacagaaggcagcccaatacgacgtacaggttatcaatccttcaaacgtaatatcgctatcggtttaggcaacgcaccgtactcaaaagaaattgtagatcagctaaacaaaggcaaaagtttacatgacgaaatcgtcaatgtgcatattgattgggcaattgaacagcaacttaatcaactttagctatcaaattaaaaaaatgatgttttttgccctatagctttaatacgaattctgtatgattatgtacagtgaattaatgccatcatcatggatatgacaatgactctacgtaatgattggactcgtgaagaaatccaagctctatatgaacaaccttttttggatttagtttttaaggctcaacaagtacaccgtgagcacttcactgccaatacaattcaggtcagcacccttttatctattaaaacgggtaaatgtcctgaagattgcaaatattgctctcaatctgcacattacgattcaaaattagaagcagaaaaacgtattgctgttgaaaaagtaattagcgaagcaaaagctgcaaaagattcaggttcatctcgtttttgtatgggtgctgcttggcgtaaccctcatgagcgtgatatgccttatgttttagaaatggtacgtgaagttaaagcattaggtatggaaacctgtatgactttaggtatgcttaatcaatcacaagcagaacgcctaaaagatgctggtttagactattacaaccataaccttgatacttctcgcgagtattattcccacatcatcagcacacgtacttttgatgaccgtttgaatactttagattatgtacgtcaagctggtatgaaagtatgtagtggcggtattgttggtttaggtgaaagccgtgaagatcgcattggtttgttacatgaattagcaaccttgcctattcatccagaatctgtgccaatcaacatgcttgttccaattgaaggtacaccattagctgatgttgaaaaactagatgttattgaatggattcgtactattgcggtagcacgtattattatgccgcatagttatattcgtttatctgctggtcgtgaatctttaagtgactcagatcaagctttagcatttatggcgggtgcaaattctctgttctctggtgataaattacttacgacgccaaatgcaggtgaaggtaaagaccaagcattatttaataaactagggttaacagctgaaaagccaaaaccaactgtttctgatttatcagttgatgcgatgagtgcttaacctcagcaaaaactgaaaagccctgatcattcagggcttttttcatttatacagaagtgactaatatgccataagtagcattcagaaaggttccaactcgaataatatccctacctgccgcatgggtaaccgataactcttggctcaatacatcaaagtgaaaagattcaaaaacatcttgatggtgtaagagccaagtcactgtatctgctatattatcatctgcaatataagttaaggctttaaagtctttactcataaataactcttaaaaataaattttatgaattctatatgagttcattctaccttaaaagaaaatctaagcagccttcggattcactaatgaacgccccgacaataagcttgttaacgctttaggtgaaaactctaaagaaagtacatgattctttaaattgattgagtggctactaatcaatggtaaaagcccctcttctgtttctaaaacatactcatccgcaatgtttagaataccttctagatttgttgtgctagaggctagatcgtggctaaagacatcataaattgtttgtaaattaaacgtcgtgttctgttcagtaggatgtttgagtaaatagtcttttaaaaacaagactaatttatgagcaaagaaaaaataattcggtttatacgtgtatttcatgttgttcatggaaccaaactccagatgatcttttattgaattacaactaaaacactaggaattaaaccttaaaattttcttaaaaaaataaatatatttacacgatatataaaaattaattttaataatgaaaatcaactagttaatttatccaaaaatatataatttatataaaattacaataaaaaaatcaattcttaaaaattaaaaaacttaaatgaaaattattatcaaattaatttaaataaaataatttcatgatattttaccatatggtataaattaaaataaaaaccgcatttatcaataaaaaataaccaatcaaaatacataaaaatataatgttattcttgttttttacttgaaaggtgctatatttccaccgcattacttgatcagaataaaagcactgaagagtaataaagcgatatttattgaatattttggggattttatgaaaaaatttatttttattgcggctagctctctttttaatattgcagcagcacaagcagctgatggtacgatcactattaatggtttagtaactgataatacgtgtacgattgatactggtgataaaaatctcactgtaaatttaccaacagtatcatctcaatctttgaaaaatgcgggcgatgttgctggtcgtacaccttttcaaatcaatttaacgaattgtgcttcagttggtaaagtcgcgacttattttgaaccaggcgcaacagttgattttaatactggtcgactattgaaccaagctacctctggtgcagctgccaatgtcaacatccaattattgggtagcaacaatgcagtaattcctgtaattgcgaaaggtgcttctggtgcacaagataactcacaatgggtaaatgtttctgctggagggaatgccgatcttaattattatgctgaatattatgcaactggagcatctacagcaggtactgtaacgtcacaagtgaaatacacgattatttatcaataaattaaaaccagcttctatttttaaatagaagctatatctcatctattatttattattgagaatatgactcatgctttttcgtggtcgtaaatttttttggggaatggcttgtcttcaagcattaattgctactacagggcatgccgaaatagtacttcatggtacacgtgtaatctatccatcagatgctcgagaagtaaacttacaactcagcaataacggtacagcgccttccttggttcaagcttggattgatgatggaaacgctaaatcaactcccgatgaagcgaatgtcccttttatcattacaccacctatttcaagagtagaaccctctaaagggcaaactttacgaattactgcactacctaatgcttctcaattaaaccaaaataaagaaagtgtattttggcttaatgtattagatataccaccaaggccggaaggtaaaaaacaagaaaataatgaagtattaaccaataattttcttcaattagcgatacgttcacgaattaagttcttttatcgaccagtaagtctaaaagaaaatattaatacattaagtgaaaaaattcagtgggtaaaaaatggtgaaaacttgcttattaaaaaccctactcccttttacattacaataagctcaatttttcaagaaataaatcatcaaaaaacagatttattaaaacagggtttaatgctttctcctttttcagaagatcaaataaaacttaaaaatagcaatataacaaatatgagctttgtttatataaatgattatggtggaagaattgaacaagtaataaggttctaagcttacctactttttaatttaaacacctactcatgaacaggcataaagacgatgtcagaatggttcatatccagtatatgctttaaaaagcgcactacatattatttagtattgagtctcgcaattaatattcccttaactgtatatgcatcagacaatatgaatagggaaaatattttaaaagctgactttgatactaattttttagtgggaaatgcacagaaaattgatattggtcgatttaagtacggcaatcctattttaccgggtgaatatagtcttgacgtctatattaatgggcagtggttaggaaaacgaaagtttgtttttaaaagtactcgttcgaatgagaatgcaaagacctgttttaccccagatatgcttttagaatatggagttaaaccagaaattcttcatcatgaagtaagtagtacctttacctgtaatgacttggacaagtgggttaacgatgctttttatcaatttgatacttctcgtctgagacttgatatttcaataccacaagttgctttacaaaagaatgctcaagggtatgtcgacccacgtttatgggaccgcggtataaatgcagctttttttgcatacaatgcttctgcctatcgtattgtaaataataaccatgaaacaaatcatgcgtttatgggtacaaatgttggtctaaatctctatgattggcaattacgccatactgggcagtggaaatggcaagatcataatgaaatacaagaaaaggtttcttcctacacatcaaataatacatatgcccaaaaggcttttcccaagctcaatagtgttgttactttaggtgattattttaccaataataatttttttgatgccctaccttatcgtgggattaacatatcaagtgatgaccgcatgcttcctaacagtatgctcggatatgctccccaaattcgaggttatgccaaaaccaatgcaaaagtagaggtacgtcagcaaggaaatttaatttatcaaacgactgttacacccggaagttttgaaattaatgatctttatcccacaggcttcggtggcgaattacaagtctctatatatgaaacaaatggagaaattcaaaagttttctattccttatgcttctgtcgttgagatgctacgacctaaaatgagccgatattcttttactttgggacagtttagagatgccaatatcaatctaaaaccatggctagtgcaaggtaaatatcaaagaggtatcaataactatttaacaagctatacaggctttcaggcaactgaaaactaccagtcttttttaataggtagcgcatttgcaaccccaatcggtgcaatttcatttgatgcaactcagtcatcagctgagttcgaacaaaagcccacccttaaaggacgaagttatcgtttaagttttaaccgactatttactccaaccaacaccaatttaactttagctacgtatagatattccacagaaaattatttgaaattacgcgattcaattttaattcgagacttgcaacaacaagatattgatagcttttccgtggggaaacaaaaaagtgaatttcagatcacattaaaccaaggccttccaaatcaatggggtaatttttatttagtaggctcgtggattaattattggaaccagcctaatcgtaatcaacaattccaatttggatatagtaatcaatttaaagatctgacttacagtatttctgcaattactcatgagtttgaccaagaaaatcaaaattctggtcacgaaacgcaatatttgttgtctttatcttttccacttcaatttaaaaaaaataccgttaattttaatagttctatttcagaagatagccgaactttaggaatgagtggttatatcggaaaccgctttgattatggctcatcaatttcatatcaagatcaagggcaaacaagcctaaatattaatggcacctaccgtactaactatacaactataggcgcttcttttggtcagtccgatacataccaacaagaaatgatcaatttaaatggaagcttggtcgctcactcacaaggtattttatttggcccagaccaagtacagaccatggtattggtatatgcgcctcaagcgactggtgctcgagtcggcaatatctctggtctaagcattaataaacaaggttatgctgtcattccttatgtaaccccctatcgcttaaatgacattagccttgaccctcaagggatgccatcaactgttgaacttacggaaacaagtcatcgtattgccccatatgcaggatcgatcactaaagttaacttttcaacaaaaacgggatatgcagtttttattagcacccaaacacctaatggcggccatttgccatttgcagcacaagtttttaatcaaaacaatgaaatagtcggaatggtagcccaaggtagccggatttatttacgtactcccctaactcaagatcatctttatgtgaaatggggacaaagtaatagtgaagaatgtcaacttgattatgacattcaatcaaaaatcttacaggaaaaacaattaattattatgacagaggcagtctgcaaatgaaaaaaatgcttataaagagcggtttactcattactagtttttttatttataaccaaacctatgccaactgtactttaagcaagggctttaccacagtcgatattccaatgacgattgggactattgtagtacgcccgaccgatccaatcggaacagttctccaaaagaatacttttactatttcacccaataattctactgcaacttgcaaccgtgccagtgaccaaattacagcggcacttccattaaactatcctgttagctcgattggaaataatgtgtatgcaaccaatattccgggtataggtattcgactttatagagaggcattcgactctacagatttttctggatattacccttataaacgcagcttgactcctaatacaacatatacgctttcaccaggatattttgttatggaagtgattaaaactgctgcaactacaggttcaggtgcattagttgctggtcgttacagtacctattatgtaacaggacaacaaaatcgccctttcttaacaactacagtattgagcagctcccctattcttattgcatcatcttcttgtgaaattcaaaacggcatagatacggttgttcagcttcccactgtgatgaagtcaggttttagagccattggatcaactcaaggtgagaaaaactttaatttatcgattctttgtaatggtggggaaaataactcaggtgtaccaacgagtaatacactgagtttaagttttgactacatttctgacacttcaaatagtcaggttattaataacagtgctgctgactcaactaaagcgaacggagttggtgttgaattgttatggaatatgaatggcgcgaacaatcctattcgaaaaggaaacaaactagatattggtacagtaagttctaaccagacagtacagtacgatattcctttaacggcgcgttattatcaaactgcttcgaatgtaacagccggtgaagtcaaagctaatgcaacagtaacgatccaatatgattagcatttcttataaacgctagagcttagtagtaagtagtaggctttatagaatgaataatttttaattaatactaaaaaagtcaaatgatcacacacattattttttaaattttactaataaataaattaaaaaaatgctcataagcgaaaaaagctaatgagcattagtgataaccacttaacctgaaatacaaattgtgggaaatagatcacaatttgcatgactataatttcaaaatttagcttaaatatcaagtcttttttttaacaaaagtttgataaatttatttaacccattaattttaaataaaaataagttaaaaataaagtttacgattttcattttacaggctttctaaagaattatcattctattaattcaaaaaacataaattttatatatacgaatgtatagtaaaattaaaaagtgctcaaataggagggtttagttaaaagtaaatattatgtaattcgataaattataaagctttacataacctataagaaaaaaaacaaacacatatctggaaatatttttcaattacagcctaacttcaagtttttattacaaaaccacatgctcattatttggaaaatattttgtattttattattaagtttaggggctttcggaattggtttaggtattagttatttagattttttcttattttttattggtttactttttctgctgtgtttttttctagccttaaagcaagcaagagaagatgcaggaagttttcctgatgaataaaaattaattaagctaattgaagtcaaggcttaagcaatattaaacacgaaaaggttcaaaacaatctaaaagaaaatccatcactacccttactgcaggactactccgcagatcttcatgaattactaaccaaatttcagcactcattgggtcatcatcaggtaattttactaaatgaccttgctggcctaaaaaatcaggtagtacagctaaaccaactgctccacaagtagcccgccattgaagctcaggatgattcgtaaccataactggctctttataatttaaccgttgttttagcttttgctgtttttgtccttgaactccaccaacttcaacgctaatccacccatagttttcttcttgtatagcatccaaatattcttgggctgcatatatgccaaaaggaacttcaccagctttacgcgcaattagataatcatctttagggcgtccaaagcgaactgcgatatctgcttcgcgatgctgtaaggaggcataatgaacatcaccgagtattctcaattgtagctcaggatattgacgataaaacttaccaagatgaggcattaccaaatgtgcagccgtagctggcggtagacttaccgaaactactccactaatttcctgttgtcctgcctgagccagacgttcaatagaaaatgtttcttccatcatacgtgtcacgattttggccagacgttccccctctgaagttaaaatataagtacgaggtctacggtccactaattttagttttaaattatcttctaactgggcaattcttcttgcaacagtagcatggtcaacacctaactttcttgcagcagctgaaagtgtcttctcttcagaaaaaactgaaaagtaatgtaaattttcccaatcaatcattgtgcaaattttcacatcagagatgaattaatatggaattgtacacctttatgtgattactcagaataaagacattctttttcggagcccaatcatgaataaatcaatggtgtatgcctatactggtgttgtaatcacaatgctgttttggggctcggcatttaatgcgatgtcttatgtgattcaatatatgccacctctttcagcagcagctgaacgttttacaattgcaagccttggcctatttattctttttacagctataggaaagctacattgggtcgcattacggcaaaatttagctatctatcttattattggaattataggtattgccggttttaacctaggctgtttctatggtttacaaaccacctcagcagtcaatggcgctttaatcatggccacaacacctttaattactttgctgttaacaattttacttgatggagaaaaactgacgcttaataagtctattggtgttgtatttggcttaagtggtgtactttttgttattagtcatggccatatttcaacgctactacacttaaaaatagcaatcggtgacttattcatcttactaggtggtgtcagtttttgtttagcgaatgtgctatcacgccgttatgtaaaaaatgctacacctttagagaccacaaccttttccatgatgttcggtgctttgactttaatcatattaagtgtaatttttgagcatccttctcaagcaattgctatggcgcctatcactgcacacttagctatgggatacgtcattatttgttctaccatgattgcttatttattttggtttaatggtattcaaaaactaggtgcaggccgagcatcaatcttttttaactttgttccggtttttagtatgttagttgccttgttagctggtcaatcacttaatatctggcaacttataggcacagctttagtcatgcttggcgtgatgagtagtggaggatttattcagattaaacgtcctgcacttatagctaagccttgcacaaagtaatgatcacacaaattcatcttaattattgcgttgtaacaaagaatgtatgtttctttaaaacttaacaaatagttgccatatatagttttaaaacacaacaaggagaattaagatgaatttggattttacaactatcgaaaaacaggccaaattgctaaaagaagagcaagagaaactagaacagcaagatcatgattttcagttagctttagacaagcatagagaatcattaaaaaatttatttaaagaactttttcatgatcgagaaattaaaacagaaaatggaggacagttttgtgtagtatttggtgattttaaaatatctctactcattgaaacagccaaattcgagaatggtgttcctgttaaattaaattccgttaatcctattattgttaaatttaaaaaggataagcccgttgcaaaagcccaattttctgatgcaacccaatatcttgatagtggttttgaaacaccccactatcagtactattacaaacacgctgataaaacacaattagttcaattttcggagttacctgtattttttcaagcaatccttgatgcagaagtctgattatctgccctcaatggagggcttttttataaactgaatttacggatcaaacagactcatctttataaaaatagtcataacatcagtttcgttttctcaactcattttaatttaaaaacaaaaaattttaaggtatcagctcaaaaaaccatttgcttctttctcaaataacttgtatatacatgtttgtatttgtttatacataaatggatctaataatagaaaagctcttaaaggataaggagagtgttatggactcatcagctgggaaaccgaaaagcggatttgttgaaaaccgaagtattgactttattcctgaaaatgaaaggcatggcagtatatttgcccaatttacgctttggttcggggccaatttacagattacagctattgttacaggtgcattagccgtcgtattaggtggtgatgtattttggtcaatcattggcctctttattggacaatgctttggtgctgccgtcatggctttacacgcagctcaaggtccaaaactcggcctcccacaaatgatttcgagtcgagtccaatttggggtatatggtgcctgtatccccatcattcttgtttgtcttatgtatattggctttacggccactggtgaggtactcgctggtaaagcaattgctcatctagcacaggtgagtaatacaacaggtattttaatctatgcttgttttattattatatttgcgacaattggctatcgtttaattcattgggtaggcaaagttgcaagtgttattggtttaattgcttttgttattattttaactcaaattttagctctctctaatatttcagaattgcttgctgtacggcattttagctggtcatcatttttattagcagtttctctttctgcttcttggcaaatttcatttggaccttatgtagcagattattctcgttatcttcctacaaaaacatcttcaacacgcgtattttgggcagttgggcttgggtctttaataggctcccaaatttcaatgatgctcggtgtatttattgctcaagtctcgaatggtggttttgttggcaatgaagttcagtacgttgtaggcatgaatccaatcgctcttgtgattacttttttatattttagtattgcattcggaaaggtcactttatctacacttaatgcttatggcagttttatgtgtattgcgaccatttggaacagttttaagccaagtgctcaaatttcaaaattaacgcgacttacaattgttcttgcaatggtaattatctcaacatttattgcagttgtaggtgaacatacttttttaagcgcattcaaatcttttattttgtttcttcttacatttttcattccttggagtgcaattaatttagttgattactattttatttctaaagaagaatgcgatgtaaatgccttatatgacccaaatggtaaatatggccgctggaacacgattggaatcgcttgttattgtattggtatcttacttcagttgccctttattgatagtaaattctataaaggacaaattgccgaaatgttgggtggagtcgatttatcctggttagtgggattgttatccactgcagttttatattatgtacttgccaaaagagctcaaataaaaatttcaaaagctcttcaacttgaacgagtaaaataatgttaagacgagatatcaaagtctaaaataatactttgatatctcattaatatttttctactgttgagcagtacttggttgtgcagaggcaggcaatccaaataacttatcgaatgtccaattaaatatgaacgtataaattggaatgataataataaatgcaacatctaaccaaaatgcggcaacaagagaaatattcatccaccacgcaataagcggaattaagaacattactaaagtaatttgaaatccgatcgcatgcgcaattcttcgtttaaccgtacgcgacttactttcttggcgagcctcccatttttcataaagaatgttgtagataaagttccacgttaccgcaatagtagtaatcatcactgaaagtggcccagtgtgctctacactatctccggccaaaagagccaaacctactgatgaaatcaccattccaataatttcatatgaagaaacataaacaatacgacgttttaaaccttgcataatctttcaacttttattacttcttattattttagtttcagctaaaatcatatataaagttaacagctttcagttctactgatatcaaaatgaattttaatagtgaaaatatcgaacttttcttaaccgtattagatactggatctttctcggccgcggcacgtaagttaaatcgagtgccatcagcagtgagtatggcaattgccaatattgaagcagaacttggttaccacttatttgaacgtacacaccgcaaagttattcctaccgcggcggctttagcattggaacctcaagcccgtattattgctgaacagcttaggctattagctacgcatgcttatgaactatcacttggtcttgaaagtaaattaaaaataggtgtggtttcagatgcgaatactgaattactttttaaagccataaagcaactagcagagaagtttccccttcttaacctagaaattattacagctcctcaagatgatattctaaatttactttatacagaaaatattagcctttgccttgcaggttcaaatctcaatataaaaatgcgtgaaagcctacaattagtaatgacagaaacagttattgctacgatctctgctcatcatccgtttttaaaagaacagaataagttaaacacgattgaagagttaattaatattcggcaaattgtggtcgcaagtagtgagctggatatggaagactcacgttcaatcattggagcaatgtactggaaaacgaatagcttacaaacagcaattaatatggtcgaagctggcttaggatggggaaattttcccttatctttggtaaaagaaaagattgaacaaggccacttagttcaattagattttaaaaatacgaaaaatcatttgcctttatctatttatctcatttggcttcaagataaaccgttatcgaaagcagccagagagcttgtccagattgttcaagcaaacttatctcaaacttgtcattaaaaaaccgccatttagacggttctttaggagctatttagatttattagactctataactttttcatcataatgcttataacaatagccaaacatcgcacctgcactgaagaaaaacattgctttaaacatgatgacactcctatgccttattgattgaaagttaaacttagcatttagccatgtttcactttgagtactatttaaatcagttttgttcataatgaaaaattacgtgacaatctttttcaatttattaaaaacacttattttgttgattttattatattaattttcataaaaaaacgagaactctatgattaaattaaagaaagcaaaaagcctattcataatgaataggcttcttactgtatttcaggactaagcaataataataattatcaaaaatactctactactgtataaattccaagtgttttagtcaagtataaaattgatcaattacaaaaggttgtagaaaatgcgaaacaatcttcattctaggttttatccataaaacttactttaaatttatactatttttggacccgtacggcttctatttctagctttgaaaggacaaaattttataggttaatattgatagatttaataagttcatctcgatagggaccaagaataatttgctcaaccttattcattctattacgcatatcctgagcatgagcaatattcttaacgtccagcttttcttcatactgatctgttcttttgctaactaatgatttattagttaaattatttaacaaaaaataaaatgttctacgtagatcttgaaaagtaaaagaaagattacattgttcattaattttttttctaaattttgaaatattaataatatgaccagattcagattttacagatggaaaaacccactctcctttattttgtattcttcgttttttcatcagataccaaagaaagtttcccatataaattttatagtacacattattgtatggatttataaaagacagagttccttcctctaaatctatatttttccaatgtaaagattcacactcattcctaaaaagccctgttaatataagtgttaataaaaaatccttatttgtttcattttcctgtcccctacctttatattcaataattgcttgcacccacttggttaaattatccacatcgatatagtttcttcgaggtgggatttcttcccagagctgtttcttctttaacaaattaaccggatttatccttggtataattacttcacaatttttattttgataatacttaattgaaaaatgatagaccgctctaagtacacgcatagataaattagcttttgcataactatactgagataactgaatatacttttcttcaatcatctgttcagtaatatcaatcagtttaagttcacttaagtctattaaatatttttctataacttctttatagtcggctaatgtcctttcttttaactcgtggtgatttatatatacttggaaagcttctttgagataaggctggtcaattttctcatttaaactattttttaatattttattatttttaatgcttaaagagtttgagtcagttaactcttttaacttctgctgtgcaagtatacgggcgtcttcaagagtaattttttcgtaatcccctaatttacaacgaattgatttcccttttactttcttttccacaatgtaagttttataagagttatttacacgaatagcaaagccaataatctcactgtcacgataaatagccggtgtgagttcaagttgatcgataaatgacttagttagctttactcgtgaagtgctcataagctagaatccctatcgcttgtgataattaacaatatagcaaaatatttttcaggtctactgctgctacttttgaaaaatacttgtgtttaataaaaaaattgattagtattgcaggcactgaaaagccttgagattaaaagcttttctcattatagggcctatagctcagtcggttagagcagcggactcataatccgttggtccacagttcgagtctgtgtgggcccaccaaatacaaaccccaaaaactttaagtttttggggttttttaactttagatatttttaaaatatagccaaatatcacttcattattcaaaaattgttcaattaaacattaaaagccttttccaatttccgtattattgaacattccttttcaacctttaggactgttataaatgtttgaattgattatttgacctgttcttaagctaaattttgtttcaggattgattttgagctttctatttgaacatcccaaaacttttcccataaatcacaatattcgaggcataggttttctaaataagtgtagtcttcttctgtacaagcttgcattaaaataaaccatagatcttcttcatgatcgtcatctgctgcctcagcagtttcatcttcagatactccatgcacatggtaatagccaccaccctccaccgctatacctacagcactggttgcttttcgtaaaggtggactgtacaaaataacttcttcttcagctacagctaataaagcagaaacggctttatagtctttataggaattttctagaaactctctcagctgatgtgcaatttctgttggttgataactccggcgctcttcctccgtcactccaaaatcatcaaggacatcttcaaataaaggataatgtgcatattctgggttaccttgataataaccgtctttgtcggtcccaggtcgaaacccaaactcatcaaatatattaagactcaaaagacagcgcggaaacatctttgcacctgcatgcaacctaggttctaactgctttgtctggtattgagccattaataaagcgtctgtaaatgtttgtacgattgcatggcgatactctaaatgaatacgctttaagttttctttattaatttcaccgttatttaaagtttctattgcaggatgatgagatactggatgtttcgcaatcttggctcttaattgagttaaaaaattaagatttttgtcccaaagttcagctgaaatgctttgtttcatccctgcaagtgcttttttcctaggattattaaagtcctcaaattttttaggcataatccactctcattaaacttattaattttttaaatttccgtattctgtttttaaaacaaatagttaagataaaaataagactcttttgttgaaaattcatattagaattaaaattctactaaatcaaatagaatatttaaaaaatttaaaaataatcttgagtagcttttataatattcgcttgaataaaattatgtttttgattatgattaatttgattaaaattttaaaatctatatcaagtaataattagtttcaattatatggaaatgtaatgtcaaaaaaagaagatattataaatactgctttagaactttttaaccaaattggttacaatgctacaggggtagacaaaattattgctgactcaaatgtagccaagatgactttctacaaatattttccatcgaaagaaagtttaatcatggagtgcctacatcatcgaaatattaatatacaaaattcaatttatgaaaaattaagcttacatccagatgtgagtccaattgataaaatacatctaatttttaattggtatattgactgggttaatagtgagaattttaatggttgcctattcaaaaaggcttttattgaagtgtctaaacaatacacctcaattcgtgaaccatttcaagaatatacaaactggcttataaatttattaaatagtttattagtagagctagatattaaagaccctactccacttactcatatcatcatttcaattattgatggtattattattgatgggacaattgataaagatctgattgatccctctaagaaatggcaatatattgagtacttgattaaaactgaaaatccttaatacttttaatatatacaataatattttaaaaattcaattatatatttttctattataaaattagaatataatatttaaaaatatttttaaattaaaataaataaaatttgtttggaagataattttctacctttttagacaaactcatattagaattctgcaaccttattgtctcccacatctctatgaaaaagtttttaggcaattctatcttcaaagcagttggttggacctatgatgcagatcctaccattcttgagaaaaaacaagttattatcggttttgaacatacttctaaccttgatgcgatcttatcaatcgctttgtttcaaatattagatttaaaaattcatacactaataaaaaaagaacttttcaaaggtccaatgaagcctattcttgaaaagctaggtggcattcccgtagaccgaaaagcaagcaaagatatcgtctctcaaatggttgaaaaattccaaagtagcgatacattcaatctagtgattgcacctgaagcaacgcgtgccaaagatggatcggaacgcaaacctattcgaaccggtttttggcatattgctaaggcagcaaatgttccaattgtactgatgtatgcaaatgcaagaaccaaaaaaggcggtattttaggtaagatttatcctacggatttacagaaagatcttgaaacgattaaagaactttatgcgcaatatgatattgatgtgaaaattaactagctaactctctcatgaagtttgagcctatatttttatgtaaatttaggctctctgagcttatttaattggctaacaaaacgtaaggcaacagttttcaagaaaaccatgcctatgctaatattctgtcacttttgcattttttaatttttggagttcacttccatggcgggtcattctaaatgggccaatattaagcatcgtaaagcgaaacaagatgccagtcgcggtaaagtttttactaaatatattcgtgaaattgtcactgctgcaaaacttggtggtgcagatcctgccagtaaccctcgccttcgtgccgttgtcgaaaaagcgctttctgtcaacatgacacgagataccattaaccgtgcaattcaacgcggtgtgggtggtgaagataatgatgatttaaaagaagtaacctacgaaggttatggtgtaggtggtgttgctgttcttgttgaaacaatgacagacaacctgaaccgtacagttccagatgttcgccattgtttcagcaaaactaatggtaacttaggtaccgcaggttctgttgcttacctatttaccaaacgtggtgagattacttttgacgatgtttctttagaagataagatcatggacgttgctttagaagctggtgcagaagatattgaagtttcagaagatgaaattttagtaatcacttctccagagacttttggtgaggttcaagatgctcttgcagctgctggtttaaaatcagacaatgctgaagtagtgatgagcccttctactaaagcagaaatcactgatattgatcaagctaaacaagtaatgaaactcattgatatgcttgaagatctagacgatgtacaaaacgtttatacaaacgttgagtttagtgatgaagttttagcgcaacttgatgcctaagacgagaaaacgcaccaaatggtgcgttttttatactttatttaataagttataacagttaaatacattgtattctttaatgacaaagctcgaatgcagagcaacgacattatcaattttaccaatccgtcttaataaaatttcgctgtagtcgtccatattacgtgcaactaattcaagaataaaatcggcgctttgaccagtcaccaaaaaagcatttgttacttcaggaatggcttcaatttcagaaagaaatttatcaaatgtctcactatcatgcttgcttaaagagacttgtagcaaaatatgcaaagtaaaacccaatttgctaaagttaatttctcttttgagttgccccatgatattagcttcaatcaagtgtttaattcggcgatgaacagaactaactgaaagattaatccgttctgaaagctcattcaaattcaggtcttcatgagacaaaatttccagaatttgtttatcaaaacggtctaactccattctttgctccaattaacacgctttataaattacagtatatcctaaagctaagcctactttggaaatcaaatatcattaaaagagagaattaagctttaccaccctcttaacttaacttttgcttgttaactgtgcagtagtatagcgttcatagcgcattttcaattacttatagcctataactcttcaatgatttaattagtatatgaataaaagcatatttaatttttaaaaatcttataatttcttaattaaaatcaatgagtttaaacaattttaaaaagttggcactctttttgttatgcacatattggaaatcttttatatccaatgtggggaatgcctgtgaaaaatatcaaaacattaattcttgcaatgagcactatcagcttaaccgctgtagttatgccagctcatgctgctactgatgcagaagtagatgctttacgcaaagaagttagtgagttaaagcaactggtccagcaattatcaaatcagcaaaaagcggtaactgtagtaaatactccaaaagtgccgtcaactacaattgcagcaagctcacccgttcctcagagcaaaccgggttggatgcaaatgcctgatggccaaacgcaagtcaagctttatgggaatgtccgtgtagatgcaacctatgactttaaagggtcaaatggcagcatttcaaatggtgctaactaccctttaaataaagatgacccaagacaggactcattaaatgtatctgcagcgactacacgcattgggttagatcttactcgacctacacaatacggcgatttaacaggcaaaattgaagccgattttatgggaggcaatggcgataatggcagtggaactttccgtgtacgccatgcctatatgtctttaggcaaatggttagctggtcaaaccacttcacctttcgtcaatacagatacttctccggaaacactagactttaccggtgcagtaggtacaggaaccacacgtactgtacaggttcgctatactcaaccaattaatgctcaacaaaaaatattagttgccttagaaggtggtgatgttgaaaaagtgagtaatgctgctggaggaagccgtttccctgctctaacaactcgttatgatttcaaaaccgcagataataaaggcttattacagcttcatggtcttgcccatgaaaatcgagtagcgcctaaaaatagttcatctgaagaaaaatttggctggggtgtaggcatcggtggcaagtacgatatcacgcctcaggatagtgtcgttgccaactattatcatgttaaaggtgatggccgctatttatcttatagcaactctgcatatgcatacgatacaactactcaagatatcaacttaggtgaatttgatagtgcggtgatcggctaccaacggaaatggagccctattctccgctctactttcgcaataggtggtattcaatataaagatgataacgtctatgcaaatagcaatttaaccaatactagctataacaaagaaatttataacgctttggtcaacttaatctggaatccggttaaaaatattgatttaggtgcagaatatacttacggccagcgtgaaacttttgcaggtgataaaggtgattactcacgcataaatttattagcaaaatataatttctaaaatttagttgtaaaaaaaagagccactcatggctcttttttattgtcacaattagtgcattgcctgaattttttccaagaaaattttagcgcgctcatgacgtgcctctaaattatcaaagaattcatgggttgggcaatcttcaagaattttaccttcatccataaaaattaaacggttagatacgcgttttgcaaagcccatttcatgtgttacacacatcatggtcataccttcatgagcaagttgcaccatcacttcaagaacctcgcctaccatttctgggtcgagtgccgaagtaggttcatcaaacaacatacagattgggtccattgataagccacgggcaatagcaacacgctgttgctgaccaccagaaagttgccctggaaatttatccttatgggcaagcagacctacacgttctaaatatttaagacctttttcacgcgcttcagcaactgaacgttttaaaacttttacttgggcaatggttaaattttccaaaacagtcatgtgaggaaaaagttcaaaatgctggaacaccattcctacccgagaacggaactttgcaagatcagttttcggatcttttagtgaaaccccatcaacaataatgtcgccttgctgaaacggctctaaagcatttacagttttgatgagcgttgatttgcctgaaccggatggcccacaaacaacaacgacatcacctttttcaatactcgtcgtgcaatctgttaaaacctgaaaatcaccataccatttagagatatgttggatgtctatcattggcatttaaaatctccaattagcgaatgatggcaatttttttctgcaaacgtttgactaattgcgatagcacaaacgagctacagaaatacaccacagcgacgattaaatagaatgttgctttcgtttcaggaccataggtattagccaaagtatctgcacgacctaagaagtctggtgcactaatgacataaactaatgacacatcctgaaatagaatgatggtttgagtaagtaataccggaagcatattgcgaaaggcctgcggtaacaccacataacgcatggattgtccataggtaaaacctaaagcgtagcctgcattgacttgcccttttgaaatagactgaatacccgaacgtacaatttccgagaaaaacgcagcttcaaaaatggcaaaagtcacaacgctggaaaataatggcccccaatacgtatctgattgaaactcaaatatctttggcaacaagaaataaaaaataaaaataacctgaattaatgggataccacggaataaatctacatagaacttggcaaagttacttgcaagggcgttgttggataaacgcatcattgccaaaggagttccaatgaggatgccccccatcattgcaagcacggttacggtaagtgtaaaaataaatccttcttttaatgccgcaataacatcaggattatgcaatagagaaaaatccataattattttcctcccgagcctaaacctggtacagccatgcgtttttcaatccatgccattataaatttaatggtgtatgtaatgattaaatagacaggtgtagacagaataagaatgataatgtcctgtgaagtctcttcacgcatggttttggtataagcaaagaaatttaaaacacttaaggcatataaaactgccgagtttttaaagacgttcattgcttctgacgtaatcgttggccataccgtacggtacgcaactggcaaaatcacataacgataactttgagcggtggtaaatcccatagctgatgccgcaaacttttgaccacgagaaaccgtgttaattcctgctctaacatgctccgaaacacgcgccgcagtataaaggcctaaagcaaaaacaccgataacagcgggttgttgatttaaaatgtttttccaccatccccctgctacaacatctccacttcctgcacttaaactgtccggtaagaactccggaaaaacaaaagcccagaagaataactgtacaattaatggaatattacggaatatttcgacatagcagttgccgataaaagcaagtggtttattgggtaaagtacgaattaccccgaggagagaacctaataaaaatgcgataagaaaggctacaatggcagtccaaaccatagtaaagacaccagaacctaacatttgtaaccatgtgggcgcctcagcataggcattgtagctagaactaccaataaccttacaaactgattctgcccatgcggctttatcgacaccatattcattagactccgcacagaatatagtccagtttagtgagccgactgacatgtttgccccttaaattaatatctttagaaaatagaccacttgtgcaaatgaatttttacacctgcacaagtaaatttaggacaaaaagatccagttagattcctgcatctgttgggtgagctttgagttttttataagatgaactttgttgcatgttcaaattagtatttttcggtggaattggcgataagaaccattttttatataaagcatccatttgaccagttttccataagttatttacagtacggtcagcaattgctttaaattttggatcatcttttgcaatcataatgccataaggttctgatgaaagtactggaccaacaattgcaaatgctttaggtgtagaagacttagcaattaagcctgctaaaatattatcatccattacaaatgcagcagcgcgtccagatgccatcatggcaaaagagtcagcatggtctttaccataaatattttgtacattaattgcttggcctttttcattcatcttaatgtacttgtcagatgtagtaccttgagtagtaacaactgctttaccatttaagtctgccaaacttttaataccagagtttgctttaacagccatgcgtacttctgttgcatagtagttagttgagaaacccacttgttgctgacgctgtttagagtttgtggtggtaccacattccatatcaatattgcccgctaaaagctcaggaatacgtgttgatgaagttactgccttgtattcaacttttaaaccaggcattttcaattcttttttaatatcatttgcaaactggttacaaatgtcgactgcataacctactggtttacctgcaacaacatatgaaatcgggtcagacgattctcgatggccaataacgattttcccagtacttttaattttagctaatgtatctgctgcctgaatttgagaagtagcaccaaccgtacaaagcataactgttgaaacaatgagagaggttgcagaacgtttcataagaactccttgatgatcattccctctatttgtctacagaatcattcatatagagaaatagagtgatttattattaaattgcaattatcgagccaacttttccaagtaggacacgtccatttgcttcacttattatttatctgtttcgcagaattaatacctttaaaactgctcacatgtttctactttaatctatgttttaatcttctgtctattattaagctcatctatttacacttaaatgtggcaattattgattacaatgtaaacacatgcacaataaagtggcttaaatttttctaaaaactgtttttagcaaaagtaacttttatcccaaaaataaaagatcaaatttattagtagcttatacttaagttgaataaacagtaataaatattaaattaagcatcaaaataatatacataaatgttttattaaaaatcatttataaaattgatagtaatattttttaagtatctttaaagttaaaaaataaaaaagccccgattttatcggagcttttttaaaaactaaaatttaaattcctcgccaatcaacgcgtgcattacgttcagtttgatatattcttaaaacgtactgtccaagcggcaaatcaagtaaatatttctgataattactccaatcgggcgatacttccccatcttcttccctttcccatggtgtaccttttatttctaataaaggtgcaagcatagaacatactgaaatatcagcgaggcttaagcggtcaccaaccatataacgtgcttggttttcaattaaatagtggtttaactcattaataagttcatccatgcatccttttgactgacttacgagctcttcttcaagcttatagttcttcttgactagagtcttgagaaacggttttgatattttctcaaactgtcgtaagtagccttgttcacccatcataatctctagagcatgatcaccttgagctaaagtatgagcaagtgcccaacgacgtacatgcaccccaagttcatctgccaaactatcaattttaagagtttgctgtctaagttgttcatcacggcgtaaaagtgcatgttccggataagtatcatccagataaagcgcaattttagtcgactcagcaatccagcgatggtcatcttttaaaatcggcaacaaattttgacctgttttaagttgtgcaaaagcacggtgaaatccaggaatcaaattatgtgcaacgtaatcaagttctttatggtctaacaaccagcgagctttttcacaataatgagacaaaggaaactgatacaaaacccgcataaaatctccacgtttatttttatttgactattcgtacaaaaatcgtcttcggtaagtagatactttagaagctatttttaatgaaaacaatggatattgtgctcatttttcactgacagttaggtctatattttttatatctttttttaccgtacttatagctctttttcatattaaaaactttttagttattcattttacaaataaaaattataatttattgatttttaatatatttctatatctatatttatctattaaaaatcaaaaaaagtgctttgcatttttattcataagctgagcataagtcctcgtttagtggaaaaatatttcttttgtaaggtaatgacagcaatacaaggtgtcattatgtctaattctctatctaaaacgacggcatacgtccaagtcattcaaaatgatcaacaagcaattaatgctgcttatcaagtggctgattttgctttagagggtcgtaatacacgtgatcaacaacgcttattaccgcaagagcaaatcgaaagctttagccaaaaaggcttaggcggaattcgcattgcaaaaaaatacggcggtgcttttgtttccaataaaactttggctcaagttttccgtattttgagtaaaggcgacgcaaatgttggtcagattccacaaaatcagattagcctgttaaacctgattgaaatcatgggtacagaacaacaaaaacaatttatcttttcagaaatattagccggtaaacgtcttgccaacggtggtcccgaacgaaatacccatgactcaaaaaccttaaaaactactcttactattgaaaacggcaaatatattttaaacggcgaaaaattttattcgacgggaacaagttttgcgcattggcttgcaattaaagcgattcatccagaaggccatgtcgttttagtgattgttaaccgagatgctcaaggcattgaagttattaatgactggaatgggtttggtcagcgtactacagcgagtggtacggttaaattaaatcgagttgaagttaatcctgaacttatttttgatgagcgattattaacacaagttccaacctatcgcggtgcgtattcgcagttattacaagtggcaattgatgtcggtattgcggaagctgcttttgaagatactttatcgaccatacacaaagcgcgcccaattattgatgcaaatgttgaaaaagccagctttgaacattacaccctacaagaggtgggtaagttaaatattttactcgacgcagcaattttactgcttgatgaagctgctgaatatttagatgaacttgatcaacttcaaacagtgactgacgaacaagtagcaaaagcttcaattttggtcgcagaagcaaaagtctatgccaatgatgcggctctacagatctctgaaaaactactagagctaggtggtagccgttcaagcttaagccaacacaatttagatcaacattggcgaaatgcccgtgtacataccttacacgatcctgttcgctggaaattacatgccattggcaattattaccttaatggtcatttccctgcccgccatgcctggatttaaggagcaattgtcatgacttcatatcaatcggttcaaaccaaacaaacatcggcatcaggccaagcacatattattcaaaatgatgcggaagctttagaaattgccaaacaatttgccgaacaatttaaaaaaaccgcagttgagcgagacgctaagcgaattttaccgtataccgaaattgatgcattaagccagtctgggctttgggcaattacagtaccaaagcaatatggtggtgccgaagtttcaagccatacagttgctcaagtaattgcgcttttaagtggtgcagacggttcaatcggacaaattccacaaaaccacttctatgcattagaagtgttacgcaatacaggtacagaaactcagaaacaacgtttatacggcgaagtgttaaatggcacccgctttggtaatgcacttgctgagtttaaaactaaaacttcaacccataaacaaactaacattcgtccgcatgaaaatggctatcttattcagggtgaaaagttttactgcacaggaagtttatttgctcaccgtatcccaaccttagttttagacgatgcaggacgtgagtatctggcatttgtaaaaagtggttcacaaggattaaaacttgtagatgactggtctggctttgggcaaaaaaccacaggcagcggtacagttaaatttgatcaggtttttgtcgatgcagatgatgttattccttttgatacagcatttttacaaccaaccttagtcggtccttttgctcaaatcatgcatgcatcgattgaggtaggcattgcacgtgcagcctttgaagaaagcttgcaaagagtacatcaagctcgcccatggattgattcaaatgtagaaactgcaaaccaagatcctttaacgatttatgaattaggacgcattgcggtagatgtacgagctagtgaagtcctattaaaacaggcagctcaatcaattgatgccgcaaaaattgaaacctcacctgaaagcattgctaaagcatccattgatgtggctaaagtacgtgctcatagtaccgatatcgcactcaaagcatcgtctaagctgattgaacttgctggtagccgtggtagtcagtctcaagatggcctagaccgtttctggcgtaatgcgcgagtacataccttacatgatgctgcgcgatggaaatattactttattgggaactacgttcttaacggtgttctaccacctcgtcgggggacattgtaatggcagactttaaagcgaaagagattttattaaacgcctttgacatgaactgtgttggacatatcaatcatggcttatggacacatccacgtgatgaatcacaccgttttaacgaattgagctattggacagaacaggccaaaactttagaaaatggtttatttgatggtttgtttatcgctgatattacaggtgtgtatgacgtctatcaaaacggtatagacctcactttaaaagagtccattcagcttccgagccatgacccgtctacacttatttcagcaatggcggcagtcactcaaaacttaagttttggggtcactgtgaacttaagctatgagcatccatatcaatttgctcgccgctttgcgagtcttgaccatttaactcaaggtcgtattggctggaatatcgtgacgggttatctagatagtgccgaacgcttaattggtcaaaaaggtttaaaagaccacgatgcccgctatgagcaagctgaagagtttttagaactttgctataaatattgggaaggttcatgggaaaacgacgcagttaaaaaagataaagcacggcgtgtttttacagatccatctaaggtgcataccattcaccaccatggaaagtattaccagagtgaaggtgtgtttcaggtatctccttctgtgcaacgcactccaaccctatttcaagcaggtgcttcacctaaaggtatgcagtttgcaacacgtcatgctgaatgtgtatttattggcggtgacaaacccgaaaaaattcgcgaacaagtgaaaaagattcgtactcttgccgaacagcaaggacgctcagcgaatgatattaaagtgtttgtcggcataactgttgttgtggccgaaacacatgatctggctgtacaaaaacttaatgaatatcgtcagtatgcaagtcctgaagcaggcttagcgcattatgcgagttcaacaggcattgacttaagtaagtttgctgacgatgaagcgattccttaccaaaaaagtaacagtattgtttcaattactgaaaagtttaaagaacagcaaatcacaaaaaatgacttaaaagctcaacatgttttaggcggtcgctatccccttatcgtgggtagtggcgaagaagttgccgaatacttaattcatcttttagatgaaactgatattgatggctttaatttgacacgtactgttgcacctgagtctcaccatgactttatacgcttggtcattccagagctacaacaacgtggtcgctataaaactgcatataaaacgggttcactacggaacaaaatttttaatcggggtgatcacttaccagaacagcaccctgttcaagcgttccgatgtagtccctataacaacagcaaaaacttaacaaaaattgaagaaataaccgcttaaatttggagatagacatggctcaaacagcctctaaaaaatggctaggcataggcttagtcgttgtagtcctttttgttgctttgttcttatggaataaacatcgtcaaagtggctcaaatgaacttgtgattggcattagtccaccatttgcaaaacctttacaagctgctgccgatgaagcaaagaaacaaggtttaaatgtaaaactggtcgaattttctgactggaataccccaaatattactttaaatcatggggatattgatgcgaactttttccagcatcaacctttcttagacaacgcaattaaagaaactggctttaagttaaaggcatttgcagtgggtgcagcctcacatgtgggactttattcaaagaaatataaaagtcttgatgaattgccacaaaacgcacgcgtagtcattccaaatgatccggtgaaccaaggtcgtgccctacttcttttacaacaagctaagttaattacgcttaaagattcaaataatcacttatctgcactcaaagatgttgtttcaaaccctaaaaatttgcaatttattgaggttgaaggaccacagactgctcgtgcaattgatgatgttgacttggcttttggttatccacattacttgcgcttagcaaaaacagcagaccctaatagtgcgcttttactggatgacaataccaataaacgttatgccattttgtttgtagtgcgtgatgactatgaggataagggcgacaaattaaagaaatttgttgagatctatcaaaactcgccaaaagttaaagctgtgttagacgctgaaattgggccaaaactttggttccctggctggaagtaataacggaaagattatggcgattcagttcaaacagcataagccttggttactcggaattacgattttaatcgtagttctgggccttgtcggttaccgttatattaaaaataaacaagccgatgatgttttaacgattggcattagcccgccttatgcagagctattacaaagcgttgccaatgaagtagaaaagcaaggcgttcatgtcaaactcgttgaattttctgattggcgagcacccaatgttgccgtacaaaacggcgatattgatgcaaactttttccagcaaagcgtatttctacgtaatgctgttaaagaaacgggttatgacttacatgcatttggtgtgggttcaggaagtcatgtgggtttatattcaaaaaaatataaatcatttgaagatttacctttaaatgcacgtgttgccattccaaatgatccggttaatttagcccgtgctttaattttattgcatcgtgctggcttaattcagcttaaagatataaataatgaactttcaactactcaagacattattgctaatccgaaacagctgagcttcgttgaagttgaaggccctcaaaccgcacatgcatataatgatgtcgatttaattttcggcttccctcactacttaaaaatggcaaaggtaaccgacccacatagcgcattatttttagacccaatcgataaaaaatatgcaattttgtttgtgacccgtcgcgattaccaagacaaaaaccaaaaacttgcaacctttgttaaagcattccagaactcaaaacaagcacaagacattctggataaagactttggtaaaggtatgtggtttcaaggctggaaataaggagaatgacgatggtgagttttggatcacaagttgatttttctctaccccatatcaaaattcgtggtttaaataagttttaccaatctcaaggtcaaaaactgcacgctttaaaagagattaaccttgatattcctcaaggtaagattttaggcattattggtaaaagtggtgcaggaaaatcttccttacttcgtacattaaatggtttagaacaagtaaatactggcagcattcatattcatcaacaaaacattgctgaattgagccattccgagcttattcaaacccgtcaacggattggaatgatttttcaacatttcaatttaatgtctgcaaaaacagtttgggaaaatgtggcattgcccttaaaagtttccaattacaacaaagcagatatcgaccaacgcgtaaatgaggttctggctctcgtaggtcttgcagataaatctaactattatccatcacaactttctggcggacaaaagcaacgtgttggtattgcacgtgcacttgttcaccacccagaaattttactgtgtgacgaagccacctcggcacttgatcctgaaagtactgccactattttggctttgcttaaaaagattaatcaggaacttggtctcaccattgtattaatcactcatgaaatgcaagtgattcgagaaatttgtgatcaagtcgtggtgattgaccaaggtgagattgtagaggctgggcaagtttggtcggtattttcacgaccagagcaacaaattactcaagaactattaaaccttgagcaaattaccctgccttttaaaatcagccgtctacccgatgaagattcgactcatattattgtaaaactgaaatatgaggctgaagcacatcaggttccagatattcaagaactacttgccagatttaaagcacccgtcaatttatatcaaagtcaggtcgataccattcaagggcacattattggctcacttttagtcggtattcctaacgtagaaattgatctttcatctatacaacaagatgcattaacagcaattgcacaatttgaggtacttggctatgcaagaccagctcattgatttattaattactggaactatagataccttgctcatggtaggcgcatctgcattcattgcctttttaattggcttacctatcgctgttattttagtcagcacttctgaacatggcattcatccgtcgcaaaagattaatcaggctttgggttgggtcatcaatatcactcgctcagtaccctttctaattttaatggttgcacttattccgcttactcgctggattgtgggtacaagttatggcgtatgggcagcggttgttcccttaacgattgcggctattccgttttttgcccgtattgcagaagtcagcttacgtgaagtcgatcaaggcttaattgaagcagcacaagccatgggttgtaaccgtaaacaaattatttggcatgtacttttaccagaagctttgccgggtattgtggcaggctttacagtgactattgtgacaatgattaactcatctgcgattgctggtgctattggtgcaggtggcttaggagacattgcttatcgatatggttatcaacgttttgatatgcaaattatgttggctgttattttagtattgattgttttagtcatgttagtacaagcgactggtgatgcattagcccagcaactcgataaacgtaaagtttaaacacaacagaaccctgctctagccatgactttgtcatggctttcatgtaaaatcagccacaatttttaatttacacatttgtgagtggttttcatgggttttaattgcggtattgttggtctgccaaatgtagggaaatctacccttttcaatgcattaactaaagcagcgattgcagcggaaaacttcccgttctgtaccattgagccaaacacaggtattgttcctgttccagatccacgtttagataaacttgctgcaattgttaaccctcagcgtgttttgccgaccactatggaatttgtggacattgcaggtcttgttgctggtgcatcaaaaggtgaaggtttgggtaaccagttccttgctaacattcgtgaaactgatgcaatcgctcatgtggtacgttgtttcgaagacgaaaacgtgattcacgttaatggtaaaattgatccattagacgacatcgcaactatcaatactgaacttgcgcttgcagaccttgagactgttgctaaagcaattttacgtttaactaaagttgctaaaggcggtgacaaagaagctgtagcgactaaagcagttttagaaaaaatccaaccattacttgacgaaggtaaaccagctcgcgcggctgatttgtctgatgacgaacgcaaattaatccgtggttttggtttaatgactttgaaaccaaccatgtacattgcaaacgttgcagaagacggttttgaaaacaacccacatttagaagctgttaaaaaacttgctgccgaagaaaacgcaattgttgtgccgctttgcaaccaaatcgaagctgaaatttcattattagaagatgaagatcgtgctgagttcctagaagcaatgggcatggaagaaccgggcttaaacgtagttattcgtgcaggctataaacttttaggtttacaaacttatttcactgctggtgtacaagaagttcgtgcatggacagtaaaagttggtgcaacggctcctcaagcagctggtgttattcatactgatttcgaaaaaggctttatccgtgctgaagttgttgcatatgatgacttcgtacaatacaacggtgaaaacggcgctaaagaagcaggtaaatggcgtttagaaggtaaaacttacgttgttcaagacggcgatgtaatgcatttccgttttaacgtttaagttaaagcttaaaaaagccccactagattggggcttttttatatttaatggcttaaatccatcatctctcgtttactgcgcgcctcgtgtaaaattcgctcatgtaaaggctttctaaagcctaacataaatataaattctgccaatacaaataaaggtcctatcgcgagtccaatcacatcatcaacaaaagcaggttttttcttttcaaaataatgccccacaaactgaaaagcccatcccaccacaaagaaaccaatacttgcagccaaccaatgtcctaaagacaattgagcaatttggctcgctagtggatacacagcaaccaagataatgagcatgagtaaaccaaaaactttatctagaaataaataatagatcgtactaactgcaatcagtaccatagctaaagtaactttaaaattaccaatatcgattcctgccctcgctgttaaacataaaattgaaaacacgatgagtggaatgcctataaaatgcgtcaaaatattttgatgatttaaatgataagccgcatattggctcagtttctgttccagatttgacataagttattccctattcaactaactatagccatactgtacaaataaggaaaatttaaagttgtcagctatttgacaaagtaatgaattttttcatggatgggctgatattggatcttatttatattaaccgattaaaagaaaacacatggtttagtgtgctgccggaagcattccaaaagtttattctagaatatggcaagcaaattacttttgagaaaaacagctatgttttccacgctcaagatgagtttgatggtatttataccgtccttgaaggctcaattagtttaggttatgtcgatgtaaatggtaatgaagcactttctgcaattgctgagccgattatgtggttcggtgaaatatctttaattgaccatgaaccacgttcgcacgatgcgattgctttgaaaaaaagtacagttctacatattcctgcaaaaccattaaatgagctactaaaagaacatccatattattggtattattttgcacgtttaactagccaaaaactcaggtacgttttcttagaacagattgcgatacaaacacgcagtatttctcaaaggcttgcacaacgtcttctgttcattttagaaggatacggtaaccatattcttattcaagatcatcacattcagatttctcaagagcaattagccaacatgctaactacatctaggcagacgatcaaccatgaattgagcctacttgaaaaacaaaatattattaaaattgcttttagaaaaattgagattttagatattgaaaaattaaaagtaattgctcaagttcattcataattgtacgaaacgccgctatataataaaaacttaaaattaaattaaaaaattagataacactgcaaatcaaaacattgttcaaactctatttccacaaaataaatgttttaaagcagaatttttcaccttacactcaagctgagcaataatactcgacaaggcgctgattaacatgaaaaaattatcaacaattcttacagcaggcgtattggctatgttaagtgtttcggcatttgcatgtccaaaaggaactcaactacaaggcggtactggaccaaatcacaaaggtggaaagtgtgtagcggtacatggaaaagctacagctcaaaaagcaaagaaagaggcaactaaaactaaacaggaagttaaaaaagacttaaccatgcaaaagcatgatgcaatgaccagtgcgactcatgcacaacatgaatcacaccaaatgactcaccaaatgaagcaagatgctgtaaaaactgccaacacagctaaagctgcaacaaaaccgtaattatcattcacccattatcgtttaaagcaaaaaagcgagattgatcatctcgcttttttatatgtataggctttatttaggagatgtgtttcctaaattcggattttcaatggcttccttacactgttgtttatcgcgctcataatctgcctgtttttgagcaaccgaactattattttcaagcgtttcgcgcgcccatacatctagactcgttaaagctttacggcaaagtgcatattttccttcagtgactgaatctgtcatttttacattgatacgccagtctgtactgagctgacgtagtggcttacgaacattatcattaatttggctgagctgtttttcatagactaaatgatcaacagtattgattaatgtccatgccttttttgcataaactgtcgcatcattcgttagtttcggcgctggtttaatttctacttttttatctgagctctgattgccattatcacaaccttgcaatataaatacgctcgcactcaagatggcgatataaactaaacgagtctttgatttgaacatatcaaactgccgaattaaacatttcggcactatgctattaaattcggctacaatactcaatctttcaagtttttataattggtttactgccaaggtgtattgtgtcaaatcaacaacagatggctgctcaaacagcaactttttggcaaggtgccaaagatagtcaagccatcgttctcacctacttaccagtttcttttgcctttggcgtttctgcatctcaatttggttttagcccatgggaagcattttttctttcttgttccatgtatgcaggtgcaagccaatttttagtggtcgcacttttagcaagtggttcttctatatggttaaccgctttaacagtcattgcacttgatatacgacatgtactttatgggcctgctctttataatttaattccaactaaattaaatttaaagaagacagccgtttgggcttggggtttaacggacgaagtttttgccagtggtatgatccaactttcacagcgcagacaacaatggtccgagtcttggatgttgggcttaagtctatttagctggatgtcttgggcaagtggttcattattaggtggtttatttgcagatcaagtcgcacaccttccaaagtttttacaagcagctttagacttcttattacctgctttatttttaagttttttattagcggcatttgaacgaaagcatagccttgtagttgctgtatcgttagtggtttcagctttggcatgttattggattaacttatcagcggctatctttattggcattctttcaggcattttagcaggtctatttaaacattatgtgctgaaacaatttgatgaggttgaaacttaatatgaacctagaaattattttggtcggcattattgtgggtatcgctaattttgcttcacgcttcggaccatttttcgtaatacaaaaactacagggcaaccaacaaagacgcggctcaatctggttaaaaatcgctttaggaagtattggtatatctgcaattagcgccatgcttgtggttgcaacccttccacctttacttgaaaccccaaataagagtttagcaatgcttatcggttttttagttttagcaggtctttattttaaatttaagaaaatcgtaccagcaactttaactgccgcaatcgtttatggccttatctatacttatttacctttataaatagataaactgatcaaccttatataatatataaatgctagaagtgattaagaataataacttctagcataaaaactcatttttgaaatttattaaaagataaatccatctagcgattagagataaaaatgtcacaagttaaaatttatgcaaatgaacgaaccattattcagtatcgcgaactgctctctcatgcgatccatcaagcacttattgaagaattgaagtatcccgtcgagaaaagatttcaacgcttcattagccttaaacctgagaattttatttatccatctgacagaagccagcattacattatcatcgaactttcaatgtttgcaggccgcagtccagccactaaaaagcaacttattcaaaccttatttcgcaatattgaagagcaatgcaaaattgcatctcaggacattgaaattaccatttttgaaacacctaaagaaaattggggcatccgtggtaaaaatgcagatgaattgcttttaaactatcaggttaatatctaaaaactacatttttaattgtccgacaaaattactttttttatgcatgataaggcttaactccaccctaagttctgctatgcttaaaaaaataattttgtcaggatgattcgcatgagcgtgacactcggtaccccacttcaatcttctgcatttaaagttttattgttaggttcaggagagcttggcaaagaagttgtaatttccctacaacgccttggtgtagaagtacatgcagccgaccgttatgatcatgctccagctatgcaagtagcacatttttcttatgtgctaaacatggcagatccagcccaattaaaacaactcattgaaaaagttaaaccaaatttaattgttccagaaattgaagcgattgcgacagaagttttactggaaattgaagcaaataaaactgcaacagtcatcccatctgctaaagctgtaaacctgaccatgaaccgtgaaggtattcgccgtcttgctgctgaagaacttggtttaccaacatctgcttatcgttttgctgatacgctcgaaagcttccgcgctgcttgcgatgacattggttatccaaactttgtaaaaccggtcatgtcttcttctggtaaaggacaatctcgtgtaaaaagtttcgatgaagtcgatgctgcatgggaatatgcaatgcaaggtggccgtgttaaccaaggcactgttattattgaatctcaaattgattttgactttgaaattacactccttaccgttcgcgctaaaaaccctgaaacaggtgaaattgaaacgcactactgtgacccaattggtcatcgccaagatgcaggcgactatgtagaaagctggcaaccacaaccaatgactcctgcagcactcgaggaagccaaacgcattgcaaataaagtgactacagcacttggtggctgtggtatttttggtgtagaactgtttattaaaggcgacaaggtttggtttagtgaggtttcacctcgtccacatgatacaggcctcgtcactttagcatctcaatttcaaagtgaatttgaattacatgcacgtgcaattttaggcttacctgtaaatacagcacgtcacagtgttgccgcaagtgcggtaatttatgctggagttgatgctaacaatttaagttatagcaatctgaatgtggctttagctcatccagataccgacttacgtttgtttggtaaaccagaaggtttcaaacgtcgtcgtatgggtgtggcaactgctcgcgctgaaaatactgatcttgcccgtactttagcgaaagaaaccgctgatcaagtaagcgttcaaactaacttttaatttttacttattggtagacccattttcatgatcaatacatcgccattgctgaactatgtctcaagtcatcatgatattaaagccattaatcagtggcgaacggatgtagaaaagcaattgcaagattcatacgaaaatgggcaatctattcgagaaatcattaaagctcgttcagacttagtagatgaagcgctcgtctttttatggaaacatgcagaacttgaccagtcaaaactaggtctttttgcagtaggtggttacgggcgccgtgaaatgctgccctattctgatgtagatatcatgattttgtctgaagatgaaatcagtgaagaaaatgaaaaacgtatctctacatttatttcctctttatgggatgtaggaaatttcaaaccaggtattagtgttcgtaccattcaaagctgtgttgaacaagccgctaccgatttaactgttgccactacattaattgaggcgcgtttaatcacgggtaatacgcaacttgcgaaatggcctcgccgtattgtttcacagacctggacagacaaaacattttatgacgcaaaaatggccgaacaagccaagcgttaccaccaacacaacaatactgaaagtaatttagaacctgacattaaaaatgcaccgggcggtattcgtgacattaatcaaattggttggattgccaaacgccacttccgagtgaaccgtatctatgacttagtgcatttaggtttcatttcagagttcgaattggctgttttagaagaagctgaaagctttctttgggaaattcgacatcatttacaccgtttagccaaacgtgatgaaaaccgtttactctttgaccatcaaagagaaattgctgctaaatttggttacgttcgtcaagaaggccaacctgtaaattacggcgttgagcaattcatgaaacgctactaccgtacggcgcagcaggtttcaacactcaatgaaatgttgctggcgtattttagtgagtcagtcattactcctcgactccccaactatgaacgcaaaattgaagttgttaacgatcactttaaaattgtcgataataaacttgccgtacagcatcacaaaatattcgcagagcatccaagcgcgattttagagttgttctatattttagccaatcgaccagatattgaaggtattcgcgctcggactttacgcttacttattcttgctgcgaaacgaattaaccaaagttatcgtgataatccagagcatcaagcactatttatgtcgattattcgctcaccatatcgactatacgacaccttggtcgcgatgaaacgttatggtgtgttaggaaactatattcctgcttttggccaaattatgggtcttatgcaatatgacctattccatatctatacggttgatgctcatacattattattgctgcgtaatttaaatcgttttagagaacctgaatttgccaaagaattccctgtggtaagttcggttttccaacgtcttgctcgtcaagatattgtctttattgctgctttattccacgacattgcaaaaggccgtggtggtgaccatagtgaacttggcgcagaagacgcgattgagtttggacgtgcacatggctttactgagcgtgaatgcaaattaattgcatggcttattcaaaaccatttgctcatgtcacttacagctcagaaaaaagatatttctgatccagatgtcgtgaaagattttgcagaaaaacttggcgacatggagcatcttgattatctctatactttaacagttgcagatattaacgccacaaatccaaaactttggaacacatggcgcgcttctctcatgcgtcagctttatacgcatgctcgtgatgtaatccgtaccggtttaggtcgtcctgttgattatcaaatgctaattgaagacaccaaatttgcagcaagtgaattactggtaaataactttgcattggctgatgtcgaaaaagtatggcaagaacttggtgatgaatacttcattaaagagtcggcagatgaaattgcatggcatacacaagcaattttaaaacatggtgataatccagagccattagtcctcttgcgtgctcaccgtaaagcagctcaagatgcggtgcaaatctttatttatacacgtgaccaacctaacctgtttgctactactgttgctgttttagaccgcatgaacctagacgttcaggacgcaaaaattatcacagcaagtaccgcatttagcttagacacttatgttgtactcgatcgtttcggtacattgcttaccgacccagagcgtgaagaaaccgttaaaaatgcattagtgaaggcgcttagccaaccagaccaatacccgggactcatgcaacgccgtattccgcgtcaattacgtcacttcgatatcgaaaatacagtcgatgtaacattgaatgaagccttacagcaaaatatggtcgaaatttcaacactcgatcatcctggcctacttgcacgcgtgggtggtttatttatgatgcaaggtttagacatccattcagcccgaattgcaactttaggtgaacgtgccgaagatattttctttgtcaccaaaaaagatgggaaaccgctgaataacgaagaggtcaaactcttctcggaaaaactgaaagcagcattagatgaagcatctaatcaaatttgtcagcactgaaactcaactacttggtaactgtttaatgaactctagcttgtcgttattacacccgtatccatttgaaaagttaaaccaactttttaaggatattaccccagcgaaccttcccttgattcctctatcaattggcgaaccgaagcatccagcaccagagtttgttaaacaggctattattgataactttaaccatctatccacttatccaaacagcaaaggcttacctgagcttcgccaaagcattgcagattggttaactaagcgctttaagctcaacagcattagtgctgaaaaccacattttacctgtgtctggtacacgtgaaggtattttctcttttgtacaggcattaattaatcgtgaagatgcaccttatgtggtaatgccaaacccgttttatcaaatttacgaaggtgctgctttacttgcaggtgcaaagccatacttcattaattgcacagaagaaaatggttatttaggtgactttgacgcggtaccagcagaagtttgggaaaagacagcccttctttttgtatgtacaccgggtaacccaacaggtactgtgctttctaaagaacaatttaaaaagctgattgccttatctgatcaatataattttgttattgcatctgatgaatgctattcagaactttggtttgaccaagctcctacgggtttattagaagtatgtgcggaacttggccgtgatgactacaaaaactgtatcgtttttcattcactttcaaaacgctcaaacttaccgggtatgcgttcaggttttgtagcgggtgatgctgctttattaaagccatatttgcaataccgcacctatcacggcgcagcaatgccagtacaacatcagcttgcctcaattgcagcatggaatgatgaaagccatgttgaagaaaaccgtaagcaatatcgtgcaaaatttgacttatttcaatctgagctaggtcatttgcttccattacaaaaaccagatgctggtttttactattggttaaaagtggataatgatgaaacttttgccaaaatgctgatggaaaaagcacatattaaagtcttaccgggccgttatttatctcgtgataccgaacaaggtaaccctggagctaaccatgtacgtatggcgttagtggcagatttagctcaatgtgaagaagtagttaagcgtttaaaagcgattctgtaagcctcttcttagcagttgtacagcctattactcaggttgtacaactgggctataacactatttatatgtaatcaaaagcacagcaaaaagaataaaagctagcgcagaacaataatataaacctgttgcagagcgcttaattttgactaaaattcgttcatgggccagcagtttaaccaataagatattccagattaaaaccacaccgaccatccatacactcataagcagtttttgaaataaactaaatttattttgtataagcagcattaagctactataaaacataatattttttggatttaaaagactcgattgcaaacctaataccaagcttttaattttgttgtgcttatcttctgcttggtcacttaaattatttacatcggttgagaaatttagagctgtagatcgggctgcattaaaacaaagaaaactcaaataagccaaatacaaagcgccaagccatttaaatattaaaagtaagatactacttagatttccaagcaatataaaactaaacaggcatccagccagaattaaagcatttcctaaagtgattcctagaacaataccatatgtataacggcgtcctttttgtagaagactagtgagaataagaaagaaatctggacccggtgataagagtgctaaaaaatgagtaaatgcaataactaagaaaacttccataacagcttcatctgtaaaacagtctggaaaatcttagaaatagagctaaacaatttcttgtaaattattgcgcggctgcgagctggaactgccgaggagttacccctgtatgtgctttaaaagctttatggaaatgactttgatcactaaaacctaaatttacagccaattcggcaagtggcacgccttgtttgagctgctctcgagcctgattaatttttaagttaatttgaaatgcatgtggagttaaacctacatttgctttgaatagacgtatgattgcatatctgcttaaacctactcgttgagcaagttcttctaaagaaataaaaccctctgaggaagaaatcacatcgatcaggtttaaaaagtctttatataaatattgaggcttttgtatttcttctaaaataaaatgaggtaataacaaatgaatcaggcaatggagaagagactgctctttttcaaaaattaatttttgcgcatcaaataatgtctcattcatttcagtaaaagcttcatataaagattcgtcttttataatgagcggcttatgctgaggtatatgtaaatcaagaccttgctcttgaaattctgaatacagttgatttaaccatgctagatctaaatgaagcatctggtaactccatgcctgatttggcataggattacatgaatgctcaacatgtgcgggcacaatgactaatgtacccgccgagatcttttgtgcagtgccaaaagaactttgaaaaacactattcccctcatctatagcaccaattgaaaatgttggatggctatgagacttataacatgttctgccaaaacatgaccttcgggtttccacataaggcattcgccgatcttgccaaaactcgaaagtttgaggaatagcgttcattgaacccattaactcgctaatgctttttcaatatcagcttccaatgcttcaggcttggttgttggcgcataacgatttaaaaccgaaccatctttacccactaaaaacttggtaaagttccatttaatagtactgcttcctaaaattccttttgcttcacgggttaaatatctaaagatcacatgagcttcaggaccttttacatctactttggcaaacatagggaatttcactccatagttacgctggcagaatgtacctatctctttattgcttccgggatcttgcccaccaaactgattgcagggaaaacctaaaacttctaaaccttggtctttatatttttcataaagtttttcgaggcccgcaaactgtggagtaaaaccacatttacttgcagtatttacaattaataaaactttacctttgtaatcagcgaattgtttaatatctccctctaacaattcagcttcaaactgataaatgttactcatggataggtttcctcatcatttttttcttgtgttttcagttgtaatgatgccgagttcacacagtagcgcaaacctgtcggctgtggtccatcttcaaaaacatgcccaagatgagcttcgcaatcatgacaaacaatttccgttctgaccataccatgcgttaaatcttcatgttcatcaataacgcttccattcagagggcgaaagaaacttggccaaccacaaccgctatcgtattttgcatctgacgaaaacaattccgcgccacaacaacgacaaacatatgtgccatgttgcttagtattccagtattgccccgtaaatgctggttcagtgcccttttgtcgcgttatccgatattcttcaggtgataactctctttgccattctcggtctgttttattaacttttcccatgacctgcaccttttattctgatgtaaacataaattgataatcgtattttatatttacgccattcatcaaaaaaacactagtctctgaacgtaaaatttgttggattttaaacatctaagtaacagaaagcaaaaagtaagcaaaatacaaaaacaaaagaaagcaattttttattttatttccttttaaggaagcaaagatggtgctattcttgtgtggcacggttgtataggacaaaacatgtctcagaaaaaaagtgtgcttttccagcaactattaccagttatcaaacagtatcagcaatcgggctttacccatgaaaaaattgttgaattacttaaagatcaacatgatctgaatttggtaacagtcaaaacatttaaaagttatttataccgatatgcaaaagtgaatccagctatgtctaaaaatactgctactctccaatccatgccaacttcccgagaaattaaaaaatcatcgaagcttgagcatgtttgttatgacattcgcggaccagtattacgagccgccaatgaaatggaagagcaaggacataaaatcattaagctgaatatcggcaaccctgccccatttggttttgaagcaccacaagaaattattaatgacgttgctttaaacctaccaaatgcaattggttatgtagattcaaaaggtatctttccggcacgtaaagcaatctgccagtactaccagcaaaaaggcatcttaaatatgcacgttaatgacgtgtatatcggtaatggtgtatctgaactcattgtcatggctatgcaaggcctactcgatgatggtgatgaaatgctcattccgatgccggactatccgctatggacagctgccgttaacctgtcgggcggtacagccattcattataagtgtgatgaagaaaacagttggtatcctgatattgccgatattgaaagtaaaattacttcaaacacacgtggtattgtcattatcaatccgaacaacccaactggttcggtatatccacgtcatgtgcttgagcaaattgtggcacttgcaaagaaacatgacctgattttatttgctgacgaaatttacgacaaaatcgtttacgatggcattgaacatgttgctgttgcttctttagcaggcgaccaattatgtatttctttcaatggactatcaaaagcatatcgtattgctggtttccgttcaggctggatggcaatcacaggcgataaaagccgtgcagcagactatatcgaaggtctggatatgttagcttcaatgcgtttatgtgcaaacgtacaagctcagtatgcaattcaaacggcgcttggtggctatcagtctattaatgatttgatccgaccaggtggacgtttatatgaacagcgtaatatcgcatgggaaatgttaaatgaaattcctggtgtaagctgtgttaaaccagaaggcgcaatgtattgtttcccgcgtcttgaccctaacatttacccaatcgaagatgatgaaaagttaatgttagatttacttcgtgctgaaaaagtactattagttcaaggaacaggttttaactggccaacaccagaccatttccgtgttgttttcttaccggcagaaaacgaattacgtgaagcaattggtcgtttaggccgtttcttggccaatcgccgttaaaaaaatgcataataaaaaaggtatcttaaattaggtgcctttttttatttttacatcatttaaataattatttaataactaatatcacctattttaatcagatcaataaaccaaattaatatactgaataatataaacttttaaaaataatatataagacttattttctcaaaaaatctcatccatatttttttaccaaacgtttaaattactatatttatcccctattcctcctttcgttattatgcaaaaaatgcataagttgatatttttttgcatttcacactgcttcaaaatcgagcaacaatcccttcccataacaacatcaccatattcgattcggttaatactgatgcaaatttaggaagatgaaatcagttacaggaccgaactgaactacaaggaaagctttcaatcatcgttatcccatctaaaagatgattgaacccaaaggatagaggttcctatgaagcaaaagaaattgctcaagtatattgtggttgctattttactaggagtattgacgggttggatctgtcatcacttctttaatgaaggcgagcaactgaagcaaatcgcttcttatttcaacatcgtcacagatatctttttacgtctcatcaaaatgattattgccccattggtatttgctacaattgtgtgcggcattgtttcaatgggcaaatcaacttcaattggtagcatcacactcaagtcaatgacttggtttattaccgcttcgtttgtctcacttgccatcggtatgggtttagcaaactttttccaacctggcgcggcgctagacctagcattaccaacagctcaacaacttagtagttcttctctcccaacaactactggttttaccttgcaatcattcttgagtcacgtgttcccacgcagcattgcagaagcaatggcgaacaatgatattttacaagtccttgttttctctattttctttggttcagctcttgcttttgtaaatcagggcaaagaaaaagactcagttatcattcgcttaactgatgaactcagtaaaatcatgtttcgcattactgactacgtaatgatgttcgcaccttttgcagtatttgctgcaatcgcttcagcaattacagtacaaggcttaggcttaattgttgattatggcattttaatcgcagaattctacttcggtctgctattactttgggtcattttgttctctgttggcgcaatcgtacttaaaaaagatatcttccgtttaggtaaattgatccgtgaacctgtaacacttgcttttgctacagcttcaagtgaatcagcctatcctaaagttatggatgctttaaataagttcggcgtgcctaaaaaagtgactagcttcgttttaccattaggttattcatttaaccttgatggttcgatgatgtacaccacatttgcggtactctttatcgctcaagcttacaatattgatctgagcttcactcaacaaatcttgattttgttaacgcttatggtgacaagtaaaggtattgcgggtgtttcaagagcttctattgtggttatctcggcaacactcacaatgttccatttgcctgaagccggtattctattattacttggtattgatcagttccttgatatgggccgtactgcaacaaacgtagtaggtaatagtattgcgactgcagttgttgccaaacttgaaggcgataaagtggctgatactgaagaattaccagagcctgtattaattaaatcaactcaagaacaaacaatcgcttaagtttcctttttctcccactctcccaacttaagagcaattttatacgaccttataaaattgctctttttttcttccaaactaaacaataaaaagttatcagtatttctctattaaataataggccaaattatggattttagttcctattaaatttcttaaaagtaaaccttaaaaacagaataaaaaaccatcattcaaaaatttatatatttagaaacacctactaaatgattattttttaattcaatttacgattgattcattatattaaacaactaagattattatttaattcgaacatgaaaaattttattttatattcttaataaatatagttttaaaaatcaattcaataaatccaccaaatgttaaataaaggcccaacccaacctattattttttaattttataaagactaaaaaatcatttgcgtgaattatattaaaaagtaaataaattcagataaattagaaaaacttaatagattttttatttttttcatgatatttattagcgctgaataaaagcaatgtttaaatgattgttgtcgaaacaaaatgatattcaaggatgcttttattcaaacaagttacggatatgttttacatggtatgtattttgcttaggaaaagcaggcgtattcggcaaactttatacttcgtcacttcataaggatattttcgatgttgactaaaactgttaaatctttcggtttagcgatgggcttattagcctgctctctcccactttacgcaaaaaacaatgttgttgttgtcgctactggcggtaccattgctggtgctggcgcaagctcagcaaatagtgcaacttatacggcggcaaaagttccagttgatgctttaatcaatgcagttcctcaaattcaagatttggcgaatgtatctggtatccaagcattacaagtagcttctgaaagtattactgacaaggaattattacaaattgctcgtcaagtaaatgaacttgttaaaaagccaactgtaaatggcgttgtgattacacacggtacagatactttagaagaaacagcatttttcttaaatcttgttgttcatactgataaaccaatcgtacttgttggctcaatgcgcccatcaactgctctttcagcagatggtccacttaacctttatagtgctgttgcattggccgcttctgatgatgcaaaaaataaaggcgttatggttctcatgaacgactctatttttgctgctcgtgatgtaactaaaggcatcaacattcatacaaatgcttttgtaagccaatggggtgctttgggtacacttgttgaaggcaaaccatattggtttagacaatctgttaaacgtcataccaatgcttcagaatttaatattgaaaatattaaaggtgatgctcttccaacagtacaaatcgtttatggttctgactctatgcttcctgatgcttatgaagcatatgcaaaagctggcgctaaagcgattattcatgcaggtacaggtaatggttctgtagcgaaatatatcgttccaacattacaaaaccttcatgacaaaaacggtattcaaattatccgctcatcacgcgttccacaaggttttgtgttacgtgatgcagaacaacctgactctaaatatggttgggtagcagctcatgatttaaatcctcaaaaagcgcgtattcttgcagcgttggcacttaccaaaaccaacgatgcgaaagaaattcaacgcatgttctggcagtactaaaattcctaaccagcccaaatcaatttgggctggttctttttatccgctttaattttctctttaaaaataaaagaacaactttgatcaatccttcactttcgtgttctcaaccttctgtttaaatactaaaatccataacagttgccaaaatattaagcatttcgtttgaactttgcgtgttaaactatgctgcggtcgcattaaggattggtttatgcagtttgttcatctcggtatttacacagaattttcgattacagagtcgattgttcgcatacccgacttggtcaagactgcggtaaaggatgaaatgcctgcgctggcacttaccgacttatccaaccttcatgctgctgtaaaattttataactcttgccttaagaaaggcattaagcctattttgggtagtacaattcgtcttaatgatgcccaacatcgtgcaactttgcttgcaatgagtgatattggatggaaaggactgaccgaaattgtttcgcgtggatttattgaaggtcaacaactcagtatcccttgtgtacaaaaagaatgggtcctagagcagcatcaagatattattgttttacttggccaacatagtgatgttgggcaaatgctttgctcatctaacccgcaaaaagcagaacctttacttgaagagtggattgaaaagtttggtaatcgtgtttatctagccttaacacgtactgatcgtcctggcgaagaagactttattcaagaagctgccaaacttgcagctaaatataatgttggtgttgttgcacacaacgatgtgcactttattgaaaaagaagatttcgaagcgcacgaagctcgtgtatgtattgcagatggttatgttttagcagatgatcgacgtccgcgcttatatagcccagagcagtatttcaaaacttctgatgaaatgattgagctgttctcagatattcctagtgctattgaaaacacctatcaaatcgctaaacgctgtaatgtcactttaaagctcggtacttactttttacctgagtatccaattcctgatggttttaccatcgatacctattttgagcacttatcaaaagaaggcttagaagagcgcttaaattacctttaccctgtcgaaaagcgtggtgaagactggcccgaaattcgtaaaccatatgatgaacgaatagattatgaagtcggaatcatcctgaaaatgggattccctggttacttcctgattgtcatggacttcattcaatgggcgaaaaacaatggtgtccctgttggaccgggccgtggttcaggtgcaggttcattagtagcttatagcttaaaaattacagatcttgatccacttcgttacgacctactcttcgaacgtttcttaaacccggaacgtgtatcgatgcccgactttgacgtcgatttctgtatcgcaggtcgtgaccgtgtgatcgattatgtatcacgtacttatggccgtgaagcggtgtctcagattgcaacgttcggtacgatggctgcaaaaggtgcgattcgtgacgttgcccgcgttttagggaagtcttatggtctagctgaccgtatttcaaaaatggttccaactaagccacttggtgtggatttggcaactgcaattgaaatggaacctcagcttaaagatattgttaccaacccttccaacccagataatgatgatgccagcgaaatttgggaaatggcattaaagttagaaggtattaccagaaatacaggtaaacatgccggtggtgttgttattgcacccggtaaaattaccgacttctctgctgtgctttgtgacgcagacggtactaaccgcgtagcacagtatgataaagatgatgtagaagctgcaggtctcgtaaaattcgacttcttgggcttacgtaacttaaccgttattgaagatgctattcaaaatattaataaaaaccgcgatagcaatgaccctttaaacatttcacacgtccctcttgacgaccctaaagcttattctgtctttgctgatgcaaatacaaccgcggtattccagtttgaatccgtcggtatgaaacgaatgcttaaagaagcgcgtccaagtaaattcgaagaaattattgcgttcgtatctttatatcgtccgggtccgatggatctgatcccagactttattcaccgtatgcatggtggagaatttgagtatcttcatccattgctagaaggtgtattagaaccaacctacgggattatggtttaccaagaacaggtaatgcaaactgcacagatttgtgcaggttacacactcggtggcgctgacttgctccgccgtgcgatgggtaaaaagaaacctgaagaaatggtgaaacagcgccaaatcttccttgagggtgctggacaaaaaggtattgatgaaagcacagctaaccatatcttcgactatatggaaaagttcgcaggctatggttttaacaaatcgcacgccgcagcctatgcacttgttgcataccatacagcatggttaaaagcccactatcctgccgaatttatggcagcagtaatgtcatcggaaatgcagaacactgacagtgtcgtatttttgattgatgactgccgaaataacggactcgaggtcttaccgccatcagtcaatatgtcgacttatcatttccatgcgagtgatgataaaaccattgtttatggtttaggggcaattaaaggtgttggtgaacaggcaatgcagtctgttattgactcacgtcgccaacaagggccttatactgacctatttgatttctgccatcgtattgatttgaaaaaaatcaataaacgaaccttagaagcacttatccgtgctggtgcgcttgattgtttaggtattgaacgttcaagtctaatggctcaattgccagaagctgtacaagctgccgaacaagcacgtagtaaccgtgaaagcggtattatggacttatttggtgaagttgaagaagttcaacgtaaaccagctaaacctgttaagccatggagtgatgaagttcgtctcaaaggcgaaaaagatacacttggactatatttaacaggtcacccaattgatgtttatcgtcaagaactcaaagcgtttattcctgcaaaacttaatgaaattaccgcaactcgtcgcggtgtaacgactgtttatgcaggacttgtccttgatgtagcgaatttcccaaaccgtgttgttattgtgcttgacgacggaacagcacgtattgaagtcagttgtaaccacgaacgtttccaacgctttaaagatattattcaagttgagcgcgtagtcgtctttgaaggcgagatctatgagcgtgaaggttttgatcgtccaatgggacgcttgaacaaagcgtttagcttaaatgaaatcagacaaaaacgcgccaatagtattcaaatcaaattaacccatgatctattgcaaccaagtttggcaaaagatctacaaaatatattattgccttattgtaatgtcgatatgcatcagcatattgcaatacagttacagattgaccaaccatatgctcaggctgagcttcagcttggcccacaatggaaagtcgctcctttagatgaacttcttgccaaactaagagattactttggtaaggataatattcatattgaatatcaggtaaaatctaaggcagctaaagcagcagaacctgttcgtccacaacctgttgcctcacctcctgtggacatgactattgatgatgcattggattcataccaaagcgaagtttctcaatattcgtaatttctggaaatcttatgagtttgtttgacgacaccgccgtgtcaaaacaattagcacaagtgcgtattgtcatggtcaataccactttaccggctaatattggcagtgctttacgcgcaatgaaaacgatgggcttgagtaagttggttctggtttcaccaaaaacctacccacatccagatattcaggcgcttgctgctggtgcacaagatttattagaacaggttgaaattgttgaaacactcgaagaagcaattaaagattgccatttagttttcggaacaagtgcaagaagccgtactattccatggcctttgttagatgttcgccctgcttccaaagaagcaatcaaggcggctgcacaaggacaacaaattgcgatcgtttttggacgtgaagaccgcggtttaaccaatgaagaattggctttggcaaactatcaccttactattcctgtgaactcggactatggtgtacttaacgttgctcaagcgattcaagtggtttgttatgaacttcgtatgtcggtattagagcaaaaagaagttgcttctgatgctgggcaaatgccgcttgctcaaggtcaaagcatgcaatgggatgagccgttagtgactcagcagcaaatggaagagttctaccctcatttggaaaaaatgctcaccgaaattgaatttttagatccagaaaatccacgtttactacctttacgcttgcgtcgtttatttggtcgtatacaattagatcgtatggaatatcatttacttcgcggtatttttagtcgagtccaagccctcacaagcggcaaatggaaaaaagcatcatcggacaaggaggatcaacccaatgcttaaacagcttaaagaagatatacaggctgtattcgcgcgagatcctgctgcacgaaatacactcgaagtacttaccacttacccgggtatacacgctttacttttgcatagacttgcacatgaattgtggaaaaaagattgcaaaggtaccgcccgttttgtttcgtcatttagtcgttttgcaacgggtattgaaattcaccctggtgctaaaatcggcaaacgcttctttatcgatcatggcatgggcgttgtaattggtgaaactgctgaaattggtgatgatgtaacgctataccacggtgttaccttaggtggtacgacttggaataaaggtaagcgtcacccaactttagaagatggcgtggttgtcggtgctggtgcgaaaatcttaggtccatttacggtaggtaaaggcgccaaagttggttcaaatgcggtagtcacaaaagcagttcctgctggtgtaacagctgttggtaaccctgcacgttatatctataaagatgccgacaaaactaaagataaagatgaagaacgtcgccgtgattatgcacaaagtattggttttgctccgtatgcgactactgctgatcaatctgacccaattttagaaggaatgcgagttttacttgaccgtattcagcacaatgaaacgcgtatgaataatttgtgccagcgtttgtccgaacttgacccaactttcaaaaaagaaagtcaagatgaacagccttttagtgatgaagagctaaaaattcttgaagaagttcgtcgtgaatgcggtgcgcaaaacaagacatcaaaaacgtaatattcttgattcataatgtaacacgcttacccttgcatgtcggtttaggttttcctagacttgttgtaccttatttaactttataaaatgaacggaagaacctatgaattttaagcctttggcatatatccttcttgcgacctcaagtttaacagcgtgtaccatggcacctgtaaaagaacaaaaaattgaaccgtttgtttttaaggaaccagagcttacacctccattttatgcattaaacccatttaattatgatgctccgcctgcatttgaagttgctttaaaagaagctgctgcacagcctgtaaccaaaatggttgtaactcgtcaggacgatccaaccaaaacacttacattagatacgaataaattgatcgtacctacagtcaacaactcacaacgttcaatgaagtacgcagttttagcgggcaataatgaaattgatgtaactgaaattgatgacttcttacaacttgttgaaggtaaagcgcgtcactatccgcctcgttttactgaccgtcaagaacgtaaaggctttgaaagcaaacttaaggaagtcactcagcgcttagatactttagctgctaatccagatgcttcatttgatattcttattcgtgcttttaaagcaagtgtacttgcccgtaaccttgatttaggtactgctcataccactaagtctttagaatatgcacaaagacttttaaaaattaatccagatgatgctgaagcgaatttctggtttggttttggcttatctgaaggtggtggtcaacgtgaggctattccgtatttagataaagctattaaaggtaatgttcaggaagcatatttagccgctgcaaataactatattgcaatggaacaaaagaaaaatgcgattcagactctaaaaaattacaaggttaaataccctgatgaagctgaagtagcagaccgtttaattcaagaaattgaaaaacaaggtcgctggaatgtatggcaagttttaacaaaccctgctatgtcttctgctaccccaagtgcagctacaaaaaagtaagcgcttaaactttataaaagggctgatttgacagccctttttttatgtttgatcaattgaaaaatactttaaaatttgtatgatcagcatattactgatccacatatttgaccataatgtttgttagaaaaagaaactcagcgctcttcacggtcatactcctcggttcaatcctgagtggatgtcaggtcgtcaatgttaagcaacaagctctcaacgttactattgcaaatgagcgtaatagtattcttacccaagataaactaagtgaagcgagtcttaatgttttgtccatgtcagggcaagaagctaaggcctgtacagactcccctgacacttgtgttaatcaacttaaaaatctgccccaaattttagatgaacagctgttatcggctgcgagtgaaatgtatctcgcaaaagcaatggctttgtcagattcttctgaatgtaaaattagtcgtttcactaaacataagccaactgaagaacaaaaagttattcaaaataaatatgatgaatgcttagatcaacagttaagtctactcgataagagtatccgttatagctatgcttatctgttttctacaaaacgtcagccgactgatcgtatttttgataatagacaagttcagatacgcgacttctataatcaagcgattgccaaaatggtcagtgtgtatgatttaagatatccacaaaaaaatgtggtagagccacaaatccatattggtaagagtgtatattcaattgattttgagtttcatagacaattatctggccaaaaattagaaaaattaatttcaagttataacttaaatttctcaggtttaagaacaatcaaccgtcgtgatggtttcggttccgaatttgtagctgtcttcccaagttcaggcaaagaagacattaatgaatacattttagatccacttaattacagctataaaaatggtgtaaatccaaatattcaccatgcacgttatttagcggcaactattgttgcagagcctaaacatgctaaaaccattcaagaaattattaatgacccagaatttgtgattcgggtctatgatccttatcgaactgataatattaatgtcgctggtaagcaatatcctttagctgcaaacttctcagctccttatggtctgtggttagctgaaaacaacctaggtgtagcggcttatttaagcttgattgatcgtgatcagcacttaaccatgccgcatttatatatgcttgaaccttataatccaaacaaaaaaattattgtgttggtccatggtttagcaagtagccccgaggcatggattgcgctcaccaacgatgtcatgggtgatactgttttaagagataactatcaagtttggcaagttttctactcgaccaatatgccaattctggaaagccggttccagatttatgcccttttgaaacaagcattcggttcgttaaacccaagtgatcctgctgcgcatgatgcggtgcttgtaggtcatagtatgggaggaattattagccgtttacttgtaagtgatgctgatattactaaacctgccttggagatgatgacgatccgtcagcaaaaccgttttaagaaacatcctatggtgactgaacggttgcaaatgcattcaattagtaactttgatcgtgcaattttcttggcatcgccacaccgaggtactgattatgcagatcgttggttcacattagctgcgcgtaaaattatccgcttaccgggtgcttttttatcagctgttgcaacttcgctcaccacagaaaatttagatattaaagatttcttgaataatattgataatggcctgattcaaaatggaccaagcgacttaagccatcaatctaaatttatggaactcactgagaatattaatccccatcaagggttaatcttccactcaattatgggcaacattaccaaaagtgatgatccaaatgtgattaccgatggtattgttccttataaaagtgctcacttagaaggtgctaaatctgagaaagttctaccgggtggacactctattcagttaacaccacaagccgtattagaactacgtcgtattttacgagagcatttagttgaacatggtttgtataaaccataaaaaataaaaagagccaaaggatatcctttggctcttttgttttaggttagattttattgcccagaacggatgatgtaatcaaacgcagagagtgatgctttagcgccttcacctgtagcaataatgatttgcttgtaaggtacagtggtacagtcacccgcagcaaatacaccttttacattggtttcgttgcggtcattgacaatgatctcaccacggttggttaactcaacctcactgtcttttaaaaagtcagtgtttggaagtaaaccaatctgtacaaagatccctgcaagctctaccacatgctcttcatcagttgtacggtctttatatttaagaccggttacttgtgaaccgtcacctaatacttctgtgcttaatgcattcataatcacggtggtgtttggcaagctatttaacttgttttgcaagacttggtcagcacgaagtttagtgtcgaactcaaccagagttacatgctcaacaatacctgcaaggtcaatcgccgcttcaacacctgagttaccaccaccaatcacagcaacacgtttgcctttgaacaatggaccatcacagtgtggacagtacgctacaccacgggtacggtattcagcttcacctggtacattcatttctctccaacgtgcccctgttgaaaggatcacagttttcgattcaagttttgcaccgttttcaagttcaacttcaaccaagccatttgctgtttggtctgcaccagtgattttgctgacacgttgcaggttcataatatccacatcgtattcacgaacatgtgcttccatttcagcagcaaacttaggaccttgggtcttttgcacagaagtgaagttttcaatatccatggtgtccatgacctgaccaccaaagcgttcagccacgatacctgtgttaatgcctttacgtgccgcatagattgcagctgttgcacccgcaggtccaccaccaatcaccaatacatcaaacgcatctttggcattgagtgctgctgcgtctttttcagctgaattggtatcaagttttgccacaatctcttcaagggtcatacgaccttgaccaatgtgttcattgtcctggaagaccatcggtacagccatgattttgcgttgttccacttcgtcttggaagaatgcaccatcaatcatggttgccgtggtgttcgggttataaatggcaatcaggttaagtgcctgtaccacgtccggacagttatgacagctaagcgaaacaaacacatcaaagttagctttgaggtttaagcctttaatctggttaagcacttcatccgacactttaggtgcatagccagacacttgtaacagagccaagatcaaagaggtaaactcatggcccattggtaagcctgcaaagaacacacgaggctgttcacctgctttagccacaccaaagcttggacgacgtgtattattaccgtcaaaacgggctgttaccttgtcagaaagctcagcgatttcagttactaattctttaatttgagcagctttatctgattcatctaaagcagcaactaattcgattggactttctaaacgttctaggtaagcttttaattgagttttaatgttttgatctaacatctgttttttactccaatgcatccaaattctttcaatagatacatagtacgttaaaacaatgaataggtaaaacagtatgtttttatatatttgatcggttttttagattttattatttcttcaatcaaaaaaagccaacctgaactcatcccagcgcaggtcggcaaactggttaaactagagtaagaccacaccaaatacagccccagcaatcaaaacatgcaatggatgaacttttttaattaaagataataaagttgcaatgactaccataatgataagtaaagtatttattgccgctgcttcagaaataatccatgcactggcaagcacagtccccacagtgacaggttgtaaagcaagctgtaaaacacggcgccatttcttatctttgaattttgaccagcctctcatcacaaatacagtaataagagatgacggtaaaaatttagcagtagacgtcaccaatagaccagacaaccctgctacatgccaccctaccaaaggtacaatcatcatatttggaccaggtgcagcttgtgccatggcaaacaacgcactaaattcttgcgccgtcatccaatgatgaatatcgactacttgacgttgcatttcgggcaaaatcgtattcccaccaccaaatgcaataagagacaactgagtaaaaatgattgctaaagtaagtagtacggcacccattacacacgtctccaaatgatggctgaataaaacgcaagtaaaatcagcatagtcaaaagtaaaggaatttttaggagagcaatgctgacaattgccgccactacaacacagattgctaatggattacgtaataagggcttaagcattttcaaacctgtggcaaccagaagccctgctgctgctgctcctaaaccttcaaaaaggtgcttaaccattaagttgtcttggaactgctcatagacataatgtaaaagtacaacaattacggtaggtgcgaagattaaaccaatgagtgagctcactgctccacggacaccgcgaaactccatgccaatcgcaaccgataaattaataatattgccgcccggtaaaaattggcacagaccaagtaactcagtgaatttttcagggcttaaccaatgcctttgctctacaataactttacgggctaaaggcagcacaccaccaaatccaattaaacctaatgttaaaaaacctaaaaataactctgtgcaagtaggaacagtatccttctgcacggcaatctcaacatggttcattttcgttacttttcactttatccgaccaagatagaatgatacttttatgatatatctacaaatgcttttattttcattaaccataccctaaaggtattcctatgctcgatttatataagcttcatgcctttgtagtggtggttgaagaaagaaatattactcatgcagcaaaccgtttgtttattcaacagccacctttaacgcgtttacttaaaaaacttgaacaagaactcggtacacagttacttattcgtcaaccgcgcgggattgaaccgacggaagcgggtttagcattatttaaagaagcacaacttttattagaacatgcccgccatattccccaattggtccaagatgttagccaaggtaaaactggacaactcaatattggctttacaagttccgcaggtttgcatccgctcatttcactcgtattacgttcatatcgggaaatgtaccctgctgtgcaaaccaaacttgaagaagcaggcagtcaaaagcaactggactggttaatttcagaaaaacttgatattgcctttttaagagcgccgattagccgagatattggtttgaagcatcttcatatattaaacgagccaatggtggtggccttacctatcggccatccgcttacacagaagaaaaaaattagtttaagtaacttgtcagaggaaaattttgttttataccgtcgctcttcagggcaaggcttatatgacaatattttatatagctgctatcaggcaggttttagtccgcgtattattcaagaagcgccgcgccctactgcgaccctcaatttagtggctgccggtattggaattagtattgtgcccgcttcaatgcataacttttgggaccatgaaatcgtctatcgcgagtttgatgattcgataaaactaaatgcgcctatttacttaattacacgagaaaatgaaaactcagctaaagtttcaaacttcattgaactcatgcaaaaactattacctacaatgacctaaatgtaaaagctaggcaataaaaaatgcctatataaaggcactttttaaagtcatttttagcaaaaaatagttcaaataaattttacgattttaagagtaatactttttctttaaccaaagcgaaacggtgacgagtgaaattaaaacgggtacttcaaccaatggcccgatcactgtggtaaatgctacaggtgatgctaaaccaaaagttgcaatagctacagctaaagccaactcaaagttattacctgccgcggtaaatgaaatagcagcggtacgcgggtaattattcctcatccgtttactcataaagaaactaataaagaacatcactacaaagtaaatcgtgagtggaatcgcaatacgtaatacatctaaaggtaagctcaccacatcgccaccttttaaactaaacatcgccacaatggtaaaaagtaaagcaattaaactaatcgggctgatctttggtaaaaatttagtttgataccattccaaccctttcgacttgactaaaatcaaacgtgtcaagaaacccattaagaatggaatacctaagtacaccaaaacagcatgtgtgatggtccagaaattgacatcaatcacttgtcctgccacaccaaaatatggcggcaagaaagttaagaacaaccatgcataggtactaaaaaataaaatctgaaaaatactgttaaaggcgactaaagctgcaacatattggttatcaccacaagctaagccattccagaccaataccattgcaatacaacgtgccaagcctatcaaaataaggcccgtcatatactccggatagttatgcaaaaaaacaatcgcaaggataaacattaaaactggagcaataatccagttttgtatcaaagataaagttaaggttttcttatccttaaatacttctggtaaagccgcatattccacttttgccaatggcggatacatcattaaaaccaaaccgattgcgattggaatattaacgttatctacacttaattcatttaaagacacagatgcctgaggaaagaaaactccaatcgctaaacctaaagccattgctataaaaatccatagcgtcaggtttcgatctaaaaaggaaagcccttgtttagtcatgttctactcgaagaaagaattgattaattttgctcaatacacacaaatgacttatgcacttatgctaagaaaatctaaattttaaagacggaaatctaggaagattaatcacaacacgttgtcgtgatgaaagactgatcttgttgttttacttttgtcccactctcgtcattttctatcacctttaaaatatctaaagcccaaacaggtaaatcaggatttaagctgtaataaacccactgtccttttctttcatccagtaatacgccatgagttcgtaacaaagctaagtgtctagaaattttgggttggctcaactcaagctgttcggttagctcacagacacaaatattttgtttatttagaactaatttaagaatatttaaccgagtttggtcagatagacatttaaagaaatcgacttggttgatcatatcttcaacaaaatatattcgttattgcaaatatacggatatccatatataaatgcaatatcttaattcatcgataaatttgtcatgactgagctagtgaagatttaccataaccctgcttgcgggacctcgcgcaatacattggcgcttattcgtcatgcaggaattgaacctatcgttattgaatatttgcaaacaccgccaagtaaagatgaattgattcaactcattaaggattcgaacctaagtgtacgtgaagcaattcgtaaaaatgttgatccctataaagatttagagatagaacaagaccattggaccgatgaacagttaattgattttatggtgcaatatccaattttaattaatcgcccatttgtagttacacaaaaaggtactcgactttgccgcccttctgagattgtactggacattttagattcacaaaacttaggctattttgcaaaagaagatggtgaaatcattattgatgagcaaggccgtcgtataaagtaattgaagatacttattaatataaaaagctaaatggcatggcaccgtttagcttttttgaatgaaacggattaaaaataggatttgataaaaggaagcagttgctctcctattaccatgcctaataaaccgactaatgcaacaagaggtggagctggtgacttaacatttaaaacataatataagacaccaacaagcaaccctacagccaaagataacaagtacattttcatcgtacataccttaaggaaacaagctatttaatgaggcaggttcccatactgttttatttaaaatgcaaaacacgagcacccaagtgcgccccagaaagattttttgtccttatcatttacaggaacatcaagcatccaagcgtggctgtgtccatgcattccacagctactagcacatgcacacaatgcactttgtgactgtaatgattgattcgatggtgcattacggttttcagataagcgccactgaccaccgaagcgttttactggcgaccatgttggagatgctggcggtaacggcggatcgtcttgcttaaactctgcccctgcgtacaccacttttccacctaaaacagtgagtacagactcaatccactggatatcttctgcttcaactttgaagtagtcatcagacaataccaccagatcagcaagttcccctgctgtgagtgaacctttgacatctttttcacctgagaaccaagccgaacctttagtccagagtttgagggccgtttgacgatctaataaatttttttcatcatacagcggtaaaccaccaactgttttacctgtagtcagccaatacaaacacacccaagggttataagatgcaacacgagtcgcatccgttcccgcacccacaggtacaccgagttctaacattttcttgactggtggcgttgcttgagcagcttcggcaccatagcgttttacgaaaatctcaccttgatatgccatacgatgctgaatcgcgataccaccacccaacgcaccaatacgttcgatattacgctcagatacagtttcggcatggtcaataataaatcgtgtcgcaaatggctgttttgaattgacgcgctcaaatacattgagtaaccgactaatactttcatcataggttgcatgaatacggaatggccatttcttttcagccaagtgctctacgatggcttcgagttcaccttccattttttctggtaaatcgggacgtggctcatagaagtcttcaaagtcccccgctgaccaagtcaggttctcgcctgctccattcattctaaatagctcatcaccatcgcccggaaatgtcatttcggtccagcggcgataatcatcaagctcttggcctgccttctgagcaaataggttataagcaattcgaaccgtcatttgattttgatcgtgcaattgcttaatcacatcataatcttcaggatagttttgaccgccaccacctgcatcaattgctgaagtaatacctaatcggttcaattcacgcatgaaatgacgagttgaattgacttgatcttcaactggcaatttcggcgctttacctaaagtcgaatataaaatcatagccgatggcgttgcgagcaacagtcctgttggctcacctttttcatttcgtacaatcttgccacctggcgggtctggcgtgtctttattaaaacctaatacatcaagggcagctcggttcaacatggcactggcgtataaatgtaaaacgaatacaggagtatctggtgcagctttattaatttcttcctctgtacacgataaaaatagataactcattgaaataatgtcataataattgttttctaacgacgaatactatgacacatctcaatgagttatatcttatcttaaacaaatatctaaaatggaacaagtcacatttaaagtgctttgcgctcatcatgcttgtgattattttaaagcaaacatgtaatctttcttctgcatctaaagccttgcccatcaagtgcttaccacaatcattttatcgacgtatgcagcgcttctttgcaggtcagtattttgattatcgtcaaatttctcagttgattttcaatatgttttcattcgaccaagtgcaactgactttagatagaaccaattggaaatggggaaaacgaaatattaatatcctgatgctcgcaatcgtttatcgtggaatagcgatacctatcctttggacattgcttaataaacgtggaaattcagatacgaaagagcgtattgctttgattcaacgctttatagccatttttggtaaagaccgtattgtgaatgtgttcgcagacagagagtttatcggtgagcagtggtttacatggttaattgaacaagacatcaacttctgcattcgtgttaaaaaaacttcattgtcaccaatcatttaggaaagaatcataaaattagtgatttatttcgccatcttaaagttggtcaaattgaatgtcgtaaacgacggattttggttggtcgggtgaaactatatataagtgcactacagttagaaaatggagagcttttactcgtcgtttctcctcagtttaatgccaatgctattcaggattatgcattacgctgggaaattgaaaccttattcagttgtctcaaaggacgcgggtttaatcttgaaaatacgcgcttgacagaccctagacgagtgaaaaaattgattgcggtgttagctataagcttctgttggtgttacttaacgggtgaatggcaacatgatcaaaaaaaagcgataaaaataaagaagcatggacgactctcaatgagtttatttcgctatggtttagactatgttcaaatggcgattcagcgtttaattggttttgggaaaaaagaagagtttaaggaaattttggcaattttaagaaggcagaaccctgataggataagggttctgtgaaatttgtcgtgtacagagaatttcttctaaagtcggtaaacgcttttcagcaaactggaattcagtccaaccgcctactacacgaacccattgtggagctagcgtattatctgcttgctctttgagtaagcgtaacgcatcggcaacggatggcacaccttcccagcgcagttccatattgtaatttagaccaccacgaataatatgcagatgactgtcatttagacccggtataacgcgtcgaccatttaagtctacaactttacttgttggagttgcgagtttcataacctcatcagttgtacccgtgcggacgactttaccatctgcaatcgctattgcttgtacttcggggttctgaggatctagtgttgtgattttaccgtttttaagtatgaggtttatgtcggtcattctgaactccattcttgtgaattatcgttctaaagaaataaaggtatatctgtattaatatcacttaaatattgaatactagacatacctttacctaaatcagtactgttttattttgcaggaattggtgcaagtacttcatgttttgatgttgtacgctcaggcgccttatgtaccatcgtataggcatagtccacacccataccgtaagcaccagaatgctcacgtacaatcgccataactgcatcgtatgtatcacggtgtgcccagtcacgctgccattcgagtaatacttgttgccaagttaccggaacaacacctgcctgaatcatgcgttgcatggcgtagtcatgtgcttctttcgatgtaccgcctgaagcatctgcgaccatataaatctcataatcgccttcaagcatggcgccaaaagcaaaggtgttattgcacacttcagtccacaaacctgaaacaatcacttttttacgattatttcttgcaagcgaatcacgtactttttgatcatcccatgaattcattgaagtacgttctagtaaaggagcatctggaaatacatctaaaagttctgggtaggtatgaccagagaagctttcagtttcaactgtcgtaatcgtgacaggaatattgaatgttttagctgcttttgctaaccctacagtattattctttaatacttggcgatctattgactgtaccccaaaagccatttgcggctggtgatcaataaaaataacctgacaattggttggtgatagttgttctaaaagtgatttattcacgtctaaactccattattcattatataaggcttttaaaattgcctactggttattatcaaaacaaataaaaatgtaaaaacatagacagcaaaacagctcgaatctgtatcctgtatggatacaatcaaatcaatgattgctttttaatttttatagtttaatcatggatatatattttttaatttttagttatccatggatcgattagactgtatttccacttttgtaagtgtcgtagaacatgggaattttagtagcgcagctagagcactcgatatttctcgtgatttggtagccaaacgtgtttgctacctcgaaaatgatttaaaaacaacgctattaaatcgaacaaccagacaaatgaatctgaccagttgtggggaaaaattttaccaacattgcaaggttatattgagtgaatttgaatgggcaacttacgagattagctataaccagcaatatcctgaaggcgaactcaagctcaatacgcccatgtcttttagcaacattttccttcaacatatcatttcagactttattgagaaatatcccagtattaaaattgatttgtttatgacagatcagctattagatgtgaatcaacacaaatttgatctgaccatacgcttagatggatctgcgccaagtttggcaaatagtaaaattttaaatacctatcaacgttatttatatgcaacacctgaatatttcaatcaacatggattacctaattctttagaagaacttaaagaacataagtttctaatttactatcaagatagccgacataaaaaattgatttttcaaaaagatcagaaagaagtgtcttttaattgtttccctgtgatgacgtgtaataatggtgaactattattggatatgtgtttgaaagatcacggtattgtttttcttccagagtttattgcagaaccttattacaaagaaggtaagttgcagaaatgtttggaagactacaccagtcagccacttcacttatatgtcacatggccaaaccgtaagattttatcgaaaaaagtaaaactatttattgattttttaacacatcaaatcattcccataaaataaccaatctgggccttttccataggaattggcccacgatttttaattagtttgaggtgtttcaattttcttatttttaaataaatttaataaattttgctctgcagatactgtactgttttcttcaataaatgtggttgcgtagtgttctaaatgttcttccatcaattgagtagctcgtttttcatcaccttgttcaatggcatctaaaatcgcacggtgttcatctgccgaacaattattatgttttggaatttcatataagccaattaataatgaagtccttgcaataagcgtctgcaaataactggtcatgatcgaattttgattagcttcaatcagctttaaatgaaattgacctgatagcttaatccactctgcccaatttccagctaaacgctcatgagactcttgatctactaagcttcgaagctcactcaaatctaggcgatgagatttttgtgctagtttttttacagtggcgatttccagcatgctgcgtgcttcaaagacttcttttgtttcatttgtgctatgttttgcgatgagtgccccacgattgggctgaatttcaataaccttatcatgtgcaagtttgacgaaaacacgtcttaacactcctcgcgttacaccaaatgcttcacataaaggtgcttcaactaaacgtgcgccaggggcaagttgcctatttaaaatagcatctacaatagcgttatatatatggtcatcaatttcatcattgctcatttctacggctttttttggtgcattcgatgacattgatttctccatttttattaatgtctcctctttttaggacttcatctattttgaatagtgtaagtttaacttaagcgtttggaaatatttctctcattttcacactatctatgctgagctgaataattcaatattaaatctctaaatatccacttatatacctaaatttatttgctttttataaaaaattaagcacgtctcagtttataaatctctctcttcatattccaaaatcgtatcaagcgaaatcactcatcaatactacatctcaagtttggcataacttttgctcaataaattgtgcacaatccaaatattacattgtgcacaattttactttcattcttttagtcagtatttcaagctgctgaagaacgtgcccgcccaacatagggaagtgagtgttcaagatgaataataccgaagcaataattaaatcttcttatgatgcaaaactgacaaatcaagacttagctcctttaaaaaagcaaacttggggcgcttataatatttttgccttctggatgtcggatgttcatagcgtcggcggttatgtcatggctggaagcctttttgcactcgggctcaatagctggcaggtacttctatctttactcatcggcattgcaattgttcagttttttacaaatctaattgccaagtctagccaacaaacaggcacgccctatcctgtgatttgccgcgcaaccttcggtgtgcttggtgcaaatattcctgccgttatccgtggtcttattgctgtcgcatggtatggcattcaaacctatttggcctcaagtgcattcttattggtcattttaaagttctttccagactggtcagcctatgctgatgtttcaacttacggctttcttgggctttcctatttaggatgggttggcttcatgctgctttggttactacaagcgattgttttttggtctggtatggacagcattcgtaagtttattgactgggcaggcccagctgtctatgttgtgatgtttgcgatggcagtatggctcatctggaaagctggctggcagaatattgatttaaatttaagtggggttcaatacgacggttttgcagttgtaccagtcatgattggtgctattgcgcttgttgtctcatatttttcagggccgatgctgaactttggtgacttctctcgttatggtaaaagctttaacgcgattaaaatggggaactttcttggcttaccaattaacttcttaggcttttctttacttactgtggtgtgtattgcggcaacgcttccagtatatggaaaacttattacagaccctgtcgagatggtcggtaaacttgataatacttttgtggtgattttaggtagtttgaccttaatgattgccactatcggaattaatattgttgctaactttgtttcacctgcatttgatttttccaacgtttcaccgagcaaaattagctggcgtatgggtggaatgattgcagcagtaggttcaattttcattaccccatggaatttgtttaataaccctcaagtgatccattacaccattgatattttaggtgcatttatcggtccactttttggtgtattgctcgccgatttttacctcgttaaaaaacaaaaaatcgtggtagatgatttatatactttagatactcaaggctcgtattggtacaaaaatggttataaccactctgccttttatgcgttaattccagcttcattaattcctattctctgcgtacttttaccacaactgtctgggctggctaatttcacatggtttattgggatgggattcggttttgtcatttaccgatttcttaaccaaccgcttgcccatgctaaatcggcaatgactaaggtaaaagtacaatgaaaattaaaattattaatcctaataccacccaaagcatgactgacaaaattgctgcatcagcaaagatagtcgcaaattctgatactcaaattattgctgtaagtcctcaaatgggccctgcaacaattgaaagttattatgatgaagccctaagtgccgtaggtgtgctagaggaaattcgccaaggtgaacttctagatgtagatgcttatgttattgcctgttttggtgatcctgcgctttatgccgcccgtgaaatcagttcggcacctgtgattgggattgccgaagcagctatgcgaactgcaagttatgtaagtactggttttagtgtagtcacgacattacaacgcacagtgaatatgagctggcatctggctcatcgctacggggctacgccattttgcaaaaatgttcgagcttgtgacattgcagttgaagagttggagcttcctgactcagatgcttatcgaaccatacgagatgagtgcaaaaaagccctagcggaagacaaaagcgatgcaattgttttgggctgtgcaggtatgagcgatttatgcataaagctacaaaacgagttgggcgtaattgtgatagacggcgttgcagcagcagttaaacaagctgaaatgttagttcagttaaatttaaaaaccagcaaagttggtgattgggcctcacctcctgtaaaaaattacacaggcatattgtcaggatttggaatgagctaaacagttactgtttcaattccaactcaaaacgctgcgttggaattgaaacaaagaataattaaagaaattaagcctctgctaactctggctgttgttcttctttataaaatggcacatcaccgttaatagttgcacggtgcataattcgatgagcatctccgtaatcaaataatgctttatgttgtgtgcaacggttatcccaaatcgcgacgtcaccgtcttgccatttccagcgtaaatgaaattgctcttgggtcgcatgttcaaacaagaaattaagtaattgctcactttcttgttcgggtaactcattaatgcgagtggtaaagccctcacttacaaacaacaaaggctcgcctgtaaccggatgagtacgcaccactggatgaaccactggtgggttacgcttaaaggtttgcaaaagcttttcacgttcttcttcgttatgggcaaaacgctcaagcggaaaagacttacgaatatcgtgggttgcagttaagccacgtagttttcgctgtaactcaagcggaagtcctttaaaagctgctgtgttgctcgaccacaacgtgtcaccacctacaggtggaattttaatagcttgcaacacacaacctaaaggtggagttttactaaaagtcacatctgtgtgccaaagttcattgtcacgcaaatcttgtttccaactgtcgagcaccatcacctcaggtacatcttcaattgaaggataaatcgggtgcacatgcaatgtaccaaaactacgtgccaagtctgcttgtgcttgtggtgctaattgttgctttcgaaaaaaaatgacctgatgatcaagcaaagcctgctggatttgttgcgttgtctgttcatttaacgcattcaaatcaatattgtgaataattgcgccaatggtaggcttgatcacttctatatttaagtttgctactactgtattcatcttctttactacaactgctgaccataccaaggagaaaactgtttttgtaaccaacgtaaaaacagctcaaaactaactgcgacaatcgcaatcacaataatgcccagaatcaccgtatcggtaattaagaactgtgctgctgattgcaccataaaaccaataccacggtccgctgcaaccaactcagctgcaactaatgttgaccagcccaccccaagaccaatacgaataccggtaataatatgaggcaaagccgttggtaaaatgacatgccaaaagacttgtgactggcttgcccctaatgacaatgccgcacgttcacgattaagctgatggcttaacacaccatgcgcactactaataatgactggcgccaaaatcgagaagaaaatcaaaagtacttttgtggtttcaccaataccgaaccaaataacaagtaatggcaaataagctaacggtggaattggacgtaataattcaaccaaaggatctagaacagcacgaacccatttgttcagccccatccacaaacccagcggaacaccaatcaccacggcagcaatcaaagctaaaaatacacgagaaatgctggctgccaaatgttgccacaaagttgctttcataaagccttcttggctgaccgatataaatttttgccagactgcctgtggactcggtaaaaacagttcaggtacaacatgcaaagcagtaatgaggaaccagagtgcaactacacttcccacactgattatgctgaccaccaaagtacgatgcttctcaaaaaatgatgatagaaatgaagcattttctgtttgcacatttaactcaggtttaagctctgctttgtcatattcatagacgttatctttagtgttcatgtaggtaacgcctccttaccgctttgtttttgtgcccttaaactttcaaatagctgttctctgagctgaataaattgagaatccgatttaattgagcgaatagactcaccctgacggtaccgttgggcaaaatcgaggtgtagagtttctacaattttgcctggatgcgccgtcatcagaactaactgattgctgagcaataatgcttcttcaatgtcatgagtaatcaaaaagaagcttttattttgttgaatccataaatcgagcactaactgctgcatgttttcacgcgtaaaagcatctaatgcggcaaaaggttcatctaataaaataaacggcgcgtgactgatcaaagctctggcaataccaacacgttgtttcataccaccggaaagttcccagatattcgctttttcaacgtgacttaaacccacaatttttaaaattgcgttcacttgtgcttcgatatccgcgcgctttaaaccttttaactgcaaagcgaagccaacattatctgcaacattcaaccaaggaagtaaggcgtgatcttgaaatacaacagcacgagttacatctggtccagttacgacttcatgatttacaagcacatcacctgaactcggcttttgaaaccctgccaagatattaagcaaagttgttttgccacaacccgactcacctaaaatcacggttaaagaaccttcttcaatggttaggttaatgtcttgtaaaactggcttttgctgtttaggaaaagtcagatgaatatgtttggcttctagtacactcatgacaactccttaaggctgcaaaaatgaagaattcacattgcctttataatcggctttaagttgatcgactttgccctgaccttttaagaatttcgctgtatcaaaaatattttgcgcaaattcaccatctaatgtttgtttttgctgagcgtggtcaaggtaaatatttccacttaataaaagcgggatatcttttgcatcagaacctgtgagctgcgcaattttttgcacgttatcagcatctttaacgtaagcggctgggtcttggttatatttttcgagttgctcaagtgtggtttggacaaaagctttcaaaaagtcaggatttttctctgcaaagtctttacgtacaacccataagtcataagttggagcaccccattcaccgacttgttttgagtcggttaaaaccgtaccagatgctttggctttacttaaagcaggttcccacacataggcagcatcaatatcaccacgttcccaagcagctgaaatttcaggtggacgcaagttaataatttttactttgtcttctggaatgttccaatgtttaagtgcagacaaaaggctgtaatgggttgtcgaaacaaacggtacagcaatggttttgccaattaaatcttgaggagttttaatgcctgatttattactcaccacgagtgcttcagatgcaccaagttttgaagtaattaagaatacttcaatcggtaaattacggcttgccgcggcagcaagtgggcttgaaccaatattaccaagtaccacatcacctgaagccagagcattgacaacatctgaacccgcatcaaattttttccattgaatagtacgttgactatgtttttcatagtctccattggcctgcgccactttgcttgggtcaaccccagtttgataagcaatcacgacaggcttattgtcacgaactgaagcacttgtattattgtcttttttattttgccatacgataaatgcaacaattgcgactactacaattgccgtgatgatcaacggtttggtcttcgtgctcataatttcatgatctttcaataatataagctcatagtatgcagctggccttataatgaaaaataaaaaaatatgagttgcttatctggtttttataaataacttttcttcataagtttttatcttttggtaaaaagcaaatttcaagcaaacttacagattagcggtaaaattaaattacttatatatcaataattaaaaacgatattcccaaatcatatgattagaaggccctgacatcccccttttaattattttatcctactcatatttcatcatttttatttttgtctctatacccagagttttgcatctaattaattttcgagattttttataacggtcagattttattatctttttatcttaaaacttctgcaaatattgagatttggacaaatctttttctggtttatacatgacgcaaatttactttttatttttaagaggagaaaaattcttttgtttaagcattctcaaattttgacaaaaacattaattacaacgtctttgcttacattcagcctctcaagtcatgcagcccttacctttggcaatgctgaagaaggtcaacttaaagtaagcggtactgttcgagccaaatatgtttatgatttcgactctgaaccgtctaccagtaaattttcctttaatgacgcggtcttatggctggactacaactccccaaaatggattggccgcctagattatcgggtttatgaatattatggacgtttaggcgatgccaattggctcaccgatgcgtggttgggttataaaattaatgacaacagtaaaattattgctggcttaaaccccgttccttttggcttgggtcgcttttggggaaatacttattatttaggcattgccaatagtgccggttaggaagatgtacacaaccttggggtgaaatatgatttcaatgatggaaccaatgaagcacaactcgccttttatcctaccgatggtggcacctatagaggtaaaagcaaagactcgagtcgatttagtatcaaccctgtcaatgcagatgactctgtaccgcaaggcaccaataccaaagaaaagaactcaattgttgttcgcggtgctcatacctttaaaaatgtcctaggccaagaaaatttctctactcaacttggcgcctccgcatggtattccaccattgaaaataagcgttcagggcaagatggcgatcgccaagtttattcggtttttagcaataccaattacaaccaatggaatttacagcttttggctggttatcaagacattgataatgccgacacccaatataaagatcatctgactttgggcggtttcgattattcatttaactcagcaaccaaaggtcagatttattcagcagaactgagctatttatttcctcagcagtttggcccaattacctctgttcgtccgtacttgaactatagttcttatcgaaaagagcaagatggctttaaaaactccacccgttttattcccggcattgcgtttaactatcaaaaattgacagtacaagcggagttgctgatgggtaaacacgatccatatctaggagacagtgaaggccttgcggctggcggaagcaatgataaatggaataaaaaagcgtttgtaatttttgcttattacttctaattcttaaaacaaaggccaacagatgttggcctttatctttatctagatatttatttttactctagtcgattactggtgaattattgagaggaagttctgttttatcttcatcaaccacatcgacatcttgggcggtaggctcaaacttaatcagtagtccaatcacaattaaaggaataaaggcaaagatagaaataatcaggtaaacatcggttttataccccgccatccagatcggtaaaacaaacaaagcaatggcttgagcaacacctgttaccgcacggttaaagccgactccaacgccacgaatcgaagctggataagccatagtaggataaaccatcatttgtgccccaggcccaaagccttccgcaaaaagccaaagcccgagcatgccaattgcggtatagagtaaaaagctattacccggctcaccaatgaatgccaaagcaatcagggcaataaactgaagtaaaaaacctgtaagcaacacatgacgagatttaaatctgctagcaacaaatacgcctaacaggccgcccgtaaatgcaaacagtaaattgagtccgagtgtggtagtaatggtcgtcaagacatcggtatgaaagaaacgcgttaaaatagaaggtaaaaagaaagcaatggtcgtgtactgaaatgccaccgaaatgtgaatcacaattgccacaatcgttcttggcaaataggttttattaaataaaactgcaaaaccctcgcgctttttcttttcagcagttctttttactttttcaactgtagcgactgcatgaattgcataggattcttgtagaacttgagcggctccttttaaatcgccttggtttgcaagccagattggtgactcagttaaatatttaccgcgaataaaaataatgagtaacgctggcactgctccgaaaattaaagatgctcgccataaccagttgctatgctctggtggtaaaagaaaataaagcgccaaaactaggccaaaacacaccgaagaagcggcataccacattgggcaccatgcggctagacgcgctgccttattgctactaccattaaatttggaaaactcagataagtatgacattgcaacgggtaaatcaataccaacactaattcccataatgaatcttgctaaaatcaaaacccaaacatttggtgcaaagcccgcgacaattgcagcaataacaaacagcaccatgtccgccatgaagacccgataacggccgattttatctgtcagccaaccaccaatcaggttacccacaatggttccgcagacaattgctgaagccaccacaccagtcatgacagggcttaaagaaaactctgagatgacttgctcaataccgaaagagagcgttgttagatcataggcatcaataaatactccaatcagtgccaaccaaataactttattcgatttacccttccctgcaaatttggaaattaattgtgaaacatcatcgggagatttaatttcataacggtggttatgatcgagttcttgtgtgctcacttaataattcctgtattttaatcacagaaacaaaataatgattattcacaccatacaaaaacaaattaatctgatgttttaatctaaattatagaattatcttttcattattaactcagcaataaaatcgatataaaaagacaaaataaaagctggcatttaaccagctatttatttaaagactttccaaaatatttaactcgcctcagcaagttttaactcttttagattacgatattttgcacctcggtgattttcaggcaaatatggcccagcaccaaatagtttttctcttaatgttccttgtgcatatgaggtttgatataccccacgtttttgcaactctggcacaataaactcaactacatcggcaaaggtttgatgcgccaaaatgtaggctaagttaaaaccatcgacatcggtatcttcaacccattgctgtagagcatccgaaacggtttctgccgaacctacaagaacaggtccattaccacctaaactattccaatttgcaatttcttcaatggtccaaacacgttctgggtccgcatttacataagaatctaataaagattgaatcgcgttagtttgaatatattcaactttgtccgttggctggtattgtgaaaaatcaacaccagaccagccagaaagcaatgttaaagcgccatcatagcttccatagctttgatattctttaaacttagcctgtgcttttgcatcggtttcatcagtgacaatcgacaaaagtgcataaattttaactgagtacgggtcgcggccttcttggaccaatttttggcgaatgccttgtaccacttttttagtggcaattttagacggcgctgcgatgaatacacactcagcattttgactggcaaacttctgcccgcgtgaagatgcgcctgcttggtaaagtactggtgttcgctgcggtgatggctcacaaatatggatgcccggtacagtaaagtatttaccttcatgctgaattggatgcacttttttatggtcagcaaagataccgctttcacggtcacgaagtaccgaaccttcttcccaagagccttcccaaagcttgtaaaggacttctaagtattcatcagcaatatcataacgattgtcatggttaacctgagtttttaggcccaagtttttcgaaccgctttccaaataagacgtcacgatattccaaccaactcgccctttggttaaatggtctagcgtgctaatacgtctagcaaaaggataaggatgttcaaaggaaatagaagtcgtgacaccaaaacccaagtgctttgtgacggctgccatcgctggcacaatctgtagcggatcattgactggaacttgtactgcacctgttaaagcatgttcagcactttgatgataaacgtcataaataccaagcacatctgcaataaaaataccgtcaaaaaaaccacgctcaagaatttgcgctaaatctgtccaatattctaaatctttatattcaacagatcggtcttgaggatgtcgccataatccaggagattgatgggctatacaattcatttcaaaagcgttaaaactaattctcttagtcataaaatatcaaccagtattttatttaatttttatactaaagcaatttttatattttctttataatatataccccaaacaaaatatgattttattctaatagttttttataatttattttaaaaaatataaataacattaagccgctaaaaatagcagcttaatatctaaaactataatttattgtttagcaacttcaccaattcgccattgataaggtggtaatgttccgttcacactaaaatcacctacaattcgatttttaaatactcttgggttatgtgaagataaagttcttacattacgccaatatcgatctagacctaaatctttgtctgttgcagaagcacctaaagcgtcaaataaaatcgtggaagcatttaaaattagatcggtaatgaccgtttgagactgcgcactttcaagctcggcaagtgcattttgttcttcttcaagctgctcattattttgaaatgcagccaagtaagcacgctgtaagctttgtgcaactttttcaacaatcgctcctgcactataagccgcgccacgaatttgtcctactacttgtaaaatttgcggatcctgttttacaaattgggcatttgcatgcgtgtagtttcgggtacgtttcgcaacagcttgagaaacatcataggttgcagcacgccctagacctgtaatgattgccagttggaccagttgatagtaagccgccgaatatttaaaacggtcatcgtcaggtaaaatttcagcttcatcgaccaatacatcgtggaaatatgccgtaccacttgcagtaagctgctgaccaaaaccattccagtcatcgacaatttcaacgccttcatcttcacggcgaacaacaactgagccagactctccttttaaatctgttaccccaacatccacccagtctgcatataggctccctgtggtgtagtattttttgcctttaacgcgaatttttccgtcactatctcgatataagtgcgtttcgaattgatcaattgactctttcccgccttcagaccatgcactacccactgtttcgccatttgcaattcggctaatccaacgctgctggaatgccttatctttacttaccaagacatcttcagtaaaaccaaaatgcacacgcaaagcttgcggtaagtttgagtcggcctctgcaagttcaatgagcaatgcaaatagttcaggaatagttgcatcaaaaccaccatgagctttaggaagtcgtaaccgtgtaaaaccaatatctttgagccactgaagttgctcatacggcaaaatatgctgctgctcacggattaaagccccttctttaatacgggcaaaagtcggtctgaagttacttgccaattcatcataccgttcagaaggtccttcaccccatacccgcgaaatgattgaaacctgactcagtgcagcgtgagttaatgaaccgagatgatgctcaaaatttaaatttgtcatgtaagtaaaaccaatattgctttgcttttaccataaaatatttatttcacatgaaaacgattatttttttataacagtattcaatcttgatataacaccaatcaaaagcatggcattgctaagcaatttgttttttgtgaagactatgctgactttgcaataaggtttgcatatattctgaatagacagaaagtttttcgaaaatatgctctgagtaaaacatgtcatcaattaagtgtgtcatttgactggcagtaaaggtatcgcataggcagactagtgctgcattcatttgagcaaacagaacgcataattgaacatgcgtttcatctttatttttaaataataatttacgcatatccaactgatccaagtcttttagaccctcatcttttacgacttttacccaatgaatttttatttttaagaactgttcaagttgctttaacgtctctaaatcaagctctaaatgggtgattaaaaaaactgtagagatatcacttcgacataatgctttaattaaatttaaataaataaattcagcttctcccatctctattaattctaaatctagatatatttttaggctttctaaaacttcgtctaccttaaatacggccttcttgtcagcttgatagtatttattaaggatagttagcacaagtggagtcgccggtgttgtataaatggctgctttgtttaagttcgcaaaaataaatggcgagaatagataagccaaactgctttgctgtggctcaatgtgagactgaattaaataaacggtttgagttttagaaaaatccctgagtactttcgctctaagtaaggttgcttcaaggttcacataagtctgttccaactgatctattaccaaggtggaaatagactgatttttaataattttatgaataatgttcagttgagaagtgataaacattttttaacatccaagctattttagaagcgttacacttacacttaggtctttaagaaacacgcaacaaccagaccctacacaaaacaacaatggaatagaaaagaagaacactatcatgtacttatataaaatctaaaacagcgttcacattatgtcttgaaagttgatttaggttggcggtaaatcctgttcatttttattttgaactttagaggactggatatatagctacagatgattgaaaaaaaactatagcacgctatcaaaacacggtttaactgttatagttttataaaaaatttctgtatctacatatacaaatacagtgagtgcatgattaagaaaacttcttaaggtaggtagttttcatgagacgatctattgcatatcgccagatatttcatcaatgtttcaatgcaacatgtatttttacaaatgcaacatcaagcctaaactttgttaacagattgagaacaatcaatcgttctattctcttgaaatatcaagcaattatgttgctttaccctgttggcactttacttgctaagaacatttatcacagaagtaagcctaattgccaaagtacttttttgcctgaaattaagtatttaaatcatttaatcatcatcagctagttcacagggggaaagtttatgagcctcggtctaaccgctttagaattagcacgaatacaatttgcttttacagtatccttccatattatttttccggccacttctattggacttgcctgttttttggcagttttggaatggaaatggttaagaacgcaaaaccctatctataaagatctatttaaatactggattaagatctttgccgttgcgtttggtatgggagttgtttccggtgtcgtgatgagttaccagtttggtaccaactggagtgagttttcacgagtagcaggaagcattactggtcctttacttacctatgaagtcttgagtgccttcttcttagaagcgggtttcttaggaatcatgctgtttggttggggccgtgttggtcctagagcccatttctttgcaacgcttatggttgccatcggaacatgtatttccatgttctggattctatcttccaatagctggatgcaaacgccgcaaggttttgccatcgaaaatggcattattgtgccaaaagactggctagctattgtcttcaacccgtccttcccttaccgctttgcacatatgggtgctgctgccttcttggtttcatctttattggtagtgggaacatctgcatggcacttggtaaagggccgtcgtgatgaattggtgaaaaaatcattctcgatgggtctttggatggtgcttgtgacttcttgtttacaagtggtgattggcgataaccacggtttaaatactcgtgagcatcaacctgccaaacttgctgctatggaaggccactgggaaaccaatcataacgagcctatgccactactgttatttgccattccggatatgaaagaagaacgaaatcactttgaagtgggcgttccatatttgggtagcttaattttgactcacagtttagatgggcaagtgactggcttaaaagaattcgcacctgaagaccgtccaaactcgaccattattttctggagtttccgtgtcatggtgggtcttggcgtccttatggtcaccttatcactcattgctctttggttacgtaaaagaggaaaactctatgaaacatcatggtttcataaatttgctgtagtgatggggcctgcaggttatgtggcaatgctggctgggtggattactaccgaagtaggccgtcaaccttgggtggtatatggcattatgcgaaccaaagatggtttatcgcatactgtttcggcagatcaggtgggtctaagtctctttatttttgtggtggtgtataccatcgtttttggtagtggaatttactacaccttaaaactcattaataaaggccctgtatttatcgacacgccaaatatggaagcaggcggcgtaggacactttaaaacaccgatgcgtccacttagtgcagttgatgaaaatattgacagcaaacaaaactctggggagaaccgtcatgattgatctttctttaatatgggtcggtattatcggtttaggtgttttaatttacgtggtcatggatggctttgacttaggaatcgggattatgttcccattcattaagaatagccaagaacgtgacgtgatgatgaataccgtcgctcctgtctgggatggtaatgaaacctggatggtacttgggggtgctggtctgtatgcagccttcccgctggtctattcaacggttttatctgcgctctacttgcctattattttcatggtgattgccttgattttccgtggggttgcttttgaattccgttttaaagctcatcggaccaaacatctttgggacttagcttttatttggggttcggttttaacgagcttcctccaagggattattttaggggcctatattcaagggattaaaaccgaaaacggtatttttgccggtggtccttttgactggcttactgcattctccattttcacaggtattggtgtagttgccatgtatgccactttaggctgtggttggctcattttaaaaactgaaaaaggcttgcagcaacgtatgtatgagcttatgccaaagctgattatcgcactgctcattatctttggtgccgtcagcttatatacgccgttaacacaccccgaaattgcagatcgttggttctctttaccaaatctgttctattttagtccagtgcctattttggtcttattgtttgttggcctgattttatcggcatgtaaaaaacagcaagaccacaaaccatttatatataccttggcgttagtcttccttgcctttactggttttgtgattagtttgtggccaaatatcattccaccatcagttacgatttggcaagcggcagcgcctcattctagtcaaatgtttgctttagtgggtgcgcttattttgattccaatcattattacttacaccattgtgtcttactgggtattccgtgacaaagttcgtgtaggtgatgaaggttatcattaaggtacgggggtgttatgaaaaagtcgtcagttaaactcagtcaaacccaatggtttattctgttatggcttggtggttttttagccttagctgtgattgcgggtttgtttaaagtgatattgatttatgctgccccttacttaaagtaaaaccatccttataaacaaatgccgtttgtagattctgcaagcggcatttattattggttcagtgcatcttttattttgttatttcgtgcagcccatacatgtataaatcagaacaactcgcccatagcattcgccaacttattgaaagcggcactctaaatgcacatgagaaattaccttcattaagagatcaggtccaacgttctggttttagtttaatgactgtgatgaatgcttatcaggagcttgaatcacaaggtctgatctattcaaaggaaaagtctggctattttgttgccgagcaaattgcactaaagccactggaacaatattcgatcgtttcacttaattctaaaattgaaattaattctttagtttttaaatatcttaaatcgattcaacatgagtctgttgtgccttttggttcagcttttcctgatagtcaacttttagctgcttccaaacttattcaaattatggggcaacttgcacggcaaaggcaaagctatgaccagacagcaagcctacctcccggtaatttagcgttaagaaaactaattgctcagcgctactgtatgcaaggcatacagaccgatccagatgacattgtcattacatctggaggattagatgcactcaatctttctttacaagcagtagccaaaccgggtgactatattctattgcaacaaaccgtgttttacggtgcttggcaggctgctgaacgtttagggcttaaggtcattaccattcccgaacatccacaacatggttttgacctagaggcttttgagcaggttattcatacatatccaattaaagtatgttggctcatgttaaatagccataatccgattgggtttacggtcagtgatgagattaaatataaaattgccaaactgcttcatgaacaccaaatttacttaattgaagatgatgtctatgaagagctttattatggcgggcaaaaaccactttcgatgaagtactttgaccaacaaaatctggtactgcactgctcttcattttctaaaactttaggggcaggttttcgggtaggttgggtctatgcgggtaaattttcggaccatatccaacacttgcagctcatgagtactatttcagtgaatgcactcatccaaaatgccttggttgagttcttgtctcatcatcattatgaaaagcatttgcgcacacttagactttcacttgaacgttataaaaagcagttttaccactatttgaagcaacatctgcccgcgatctgcgagatttattattacccaagcggttattttctatgggttaaattgcctcataaactcgatagcatgcaaatttatgaagaactcatccaacaagatattggtgttgcgccaagcccactctttagtgtcttacccgcacagcaacattatttaagaatcaattgttcttttgagtggaacgaaaaaattcaagctgctttagatcaagtcatcaaaactattcaacaaagggtcgaagcaagcctgtaaagtgatgcttcgacctaagcacaattttaaagtatttaatttatgatagtttcatcttaaagcgcgattttaagggtaagaatatctggatgttaatatggaaatagatgaagaactgactcttaaaaaaatacagatttttttggcctttatgcgctgtggcaacttgtctaaaaccgcggcagaaatgcaactgagtaatgtcagtgttcataaagcactacactctttagaaagcgctttacgttgtcctctttttaaaaatgaaggccgtaacctcattcctttaaaaagtgcttatgtatttgaagaacgggcgcaaaaaatcgtacaagacatttttatcaccgtaaataaaaccagagaagccgctggctttgcagccaaggttttacatttagggtctctttattctttgacggtaaatacaattccaaatgtgattagcggtctcaaactcagacgtagtgagcttgatattcaactgttgctgagttcaaatcaggatttagtgaaaaagctcaaagcaactgagctggatgcaatcattgtagctttaaatgaaaccactcaagatgatgactttgaaattttgccgatgttttcagacgatatctttctggcagtcaataaagattcaaaatatgctgagtttaaagatattgatttaagccttttaaaagaagaaacttttttaactttaaccaagggttttgcaactcataacgacagcgacatcatttttaaaaaagccggtttttcacctaaagttgctttgcaggtcaatgatatttttaccttaattagtatggttagctcaggtgtaggtttcgcactattacctggccgtatttctgcggtttatgaaagttcggtaaaacttattcctctaaaacagcaataccacatgcaacaagaaattggtctggtctttttaaaaagtaaagaacgcgacccaaacttacttgctctgattgctgaatgtcgtatgtttgcatctaactttaaaagatagaagctgctgcgaataacaacagctcttttgcctgattataaaatacgtattaacccaccaaagctttaaccgcaaagaacagaatagttggacccattaaacagccaaggcccgtgtgaaaagttgctgtaagtgcaccgtaaggcactaaacggcggtctgtagcagctaaaccagctgacacaccacttaccgttcctgccaaaccaccaaaaatcatcgcagaacgtggattgtctaatcccataaatttcgcagtgagtggtgttgagaccattacacagattgctttcaccaagcccgttgcaattgataacgccatgacctcagagctcgcaccaatggccgcacccgtaacaggcccaacaatgtaagtcactgcacctgcgccaattgtggtaatacttacagcatcgcgatagccaaaaatccacgcaaacatacaaccgacaataaatggcaaaatggtcccaagaaataaagagaaggcaccaataaatccagcttttttggcctcagtcgcttgtacttcaaatgctgtggctacaatagtaaagtcacgaagcattgcaccgcccatgagtcctacacctgtaaaaagtgcaaggtcggtcaagcctttttcaccacctgtcatttttccgccaaaccatgccaaaatcaaaccaattacaatcgcaattgctgaagcatgcacacgtccattggttaaatatttagagagcttggtcgacaaccacataattaaggcaattaaagcaaaagctgtaattaaacctaaatgtgttaagtcttttaataataattcaaccatgaactttacctccgattcggtttaaggctgtgtcctcttcttctttaggtaaagggctggctttgttatatcgacttagaccagcaatagtgagcgtacaaactgcaactgagactacagccgcaaagagtgccatatggccactcgataatgctgccactacattttgttgggctgccatagcaacaacaaccgggatatacatggtgccccagaatgaaactcctttttcagtttcaactgtcatcattccacgtttttccatccataaccgtatacaaatgagtaaaatcatggcgatacccacgccaccaacattggactttacacccaataaaacgcctaatagatcaccagcaattacaccaaccaaggtgcaaagtgcgagtaaaccaactccatatataatcatgacaatccctcatatccttggatcatttatgcttttgtaaaatctgactcaaaaagaaaaactatttgcctgttctttttgcattgccaattgaatgctgtctaaacgtgttccctgaaatgacaatactgttccttctttaaatgttcgacgtgcaagtgtagtaagcaccgttcccggcaaagcttcgatctgtaacctcacacctcgctcccatgcagcttggatggtactttcccaatctacagttcgactcatattaaaagccaagtcatcaccaatctgttctggcctgctaagcgtacgagccgttgtaccacttaaataacgtattttaggctgctttaaagtcattccctccatagacgctgcaagttgctttgcttgctgacttaataattcacagtgcgatggcaccgatacatctaatttttttgccaccacgccttgttgctttgctaaaacagcaacttggttcatggcttcaaaacttcctgaaataacgatctggttatgtgcattaatatttgcgacaaacacctctggctttatttcataaatctgtttgacccatgtttcaacagttgcacggtctgtaccaatcagagctgtcatgccatatccagtggggtaagcgttttgcatgagttcacctctgtaggcaaccaaacgaacggcatcctcaaaggctaaaactcccgctacaaccgcagccgaccatgcaccaattgataaacctgctacataatctggtgttaagttttccgctgttaataaggctgaactcaccacacctgaaatcagtaagcaaagctgtactgaacgtgtcgattgcaatgcagccggactatctaacatcaggacatcttctttgagtgcatccgatgcacgctcaaggtattctttagctagagctgtttgagctaagtcgtgcagcatattgcttcgttgcacaccttgtcccggatatacccaaattgaagccatgatatctattccctaattccatgggttttctaataaaacagcaccatcaggacgttttaatagaacttttctgctattccttgcccattcttttaatgccaaaccgccttgtggaagttgaagctgtatatccacattcagccctgcttgctgaaaattttcgagtagctcaaccgcctgctttttggcaaaaggctgttcagctcgaatcaacaaatctatgtcactttgctcggttactgtttcaattcccgttgctagttcaaagccgaaacttcctgtatatccccaacattctgaaaagtttttcataatgctggaaatgctctgtaaacgttctgccaagtgctcaaactgttgcgtatctacgcgagtcagcgcttctggcttaagctgtctgctaattaaagatcttggcatttgagctgcatatcgttgatagcgaagttgtcctcttacacccacagccacctgatctacaggagtaattgcccgtcgaaccacaacaggatcaccacgttgcaatacctctctcacccaatgcggagcatcatcagccaagcaatcgaccgtcataccccacaacaaatcatgggcttcgagcttaagtttcataaccattgctcacgcaataattcacggacctttttagacatttgacggttttggccatgcagtctttgttccagtcctctcgattgctcagcattaatttctttaaacgcttgagcaattgcctgtttcgctaacaaaagatcatcgtttgtcggttgttcagggttttcaacagataacagttcagataacaaaccaagcgtggcataactttcaatgtcataagccattggtggaatgcttgaggccaattgctctaactcatcaaccgaccgtaaggtaacgcgtgcagcagattccttacccattgcatgcaccataacacctgaatcttttaaggcaataatacgattggcttggtatccatgcgccaagaaagcaccagacatcgacttaccaaccaataaactcacaattggatgacctgccaatctggctctagcatagctatctactgcacccgctaaagcttgatgaatgcccagtaattcttcacgacgcccataggcctgacttggcacatcaaccagacataaaatagcgcgtttagtttcagcctgtgcatcggcttggatcacatcatcgactacttttgccaaactccagccttctaataatccaacttctccttgttttgcccgtgggaacagattattgctgtcttgaacaacggcaatcacgcgcaccacttgctgatcaatctgaccatcagccacccaaatcgaagctggaaaaccttcaactgtcttaaaaccctgcgtaagtgctttaaaccaatgtgcaccacgagtagatgcttttaatgtatcaacggcgatattcatgtttgctctccttgatacaaagcttgaacttgtgctggggtaatctgctcagcagtatcaacttgttgtagcttttctaaatagaatgagtaatttgaactacgatgctgctgaggcacaccttgagttaaataatcaatgacttgctgacgaattttctggcgatcatcgtctacataagcatctaccaaaccactagtgaagcgctgattaccacccgtaatactccatataaatggacgatctttggcgttatattcttgtacaccagcttcttgttctatcacttgtgggccatttaaacctaaacgtccttcttgtgtcattacaatatagctacatagtccagctgcaattgacataccgccgaagcaccctacactgcctgcgaccacagcaattacgggttgatactgccgtaagttcacaattgcagcctgaatttcagcaattgcagccaaacccagatttgcttcttgtaagcgaacgccacccgtttccaacaataaaattgcagctgttggaatgcctttcagattgtcttcaaccgcaagttctaaggctcctgcaattttggcaccacctacctcacctaaacttccaccttgaaataagccttcaatagaaattaaaactactggctgttcttgaatagttccctttgcaatcactacaccatcatcggcttgcggcacaatattttgctgaaccaaccaaggcgacataacacgggcaaacgggtccaataactctcgaaaagtcccttcatctaataatgctttagcacgctctctcgcactcagctcaataaaatcttgtttatttaacaagctttgaatatcagtcatgagcaatctcctccaatgcttgttccagacgtaagcgaacgacaccgggagttgcaccaaagtcatgaatatcaatattgaccgctggcggtatttgagcagtaaaaatccgttcaaaaagattgtgccaacgtgctgcactgccatctaccgaagtcactacctgaatagaggtctttcccttttcaccgggttccatcaaaatttctaaatcgccagagcctacacatcctaccagtgctttttttacaggtggctctgtggccacaaattcaaaatgaagtgtttccataatcaaaatccctttttatttttcacagatgactgctcaacacgatctataaacaaggttgctgccaacaaatctgcggcaccaccagcagacgccttcatccgaagcagatcaatctctaaaagatgcaaagcacgtcgaccttctaagcttgaactgccacccaaatccaatacttgctgagcaccttgttgcatatgctttaaaccagatgttccagatcgataaagcacacaggtatcggtcaaatctgtcatcatggcaagtaaggcatctaagcgggcgaactcttctttcatgggtttactacgactttgataaagttgctttaacccaaaattcacaatagttggaaagccttgttgtgcctgttctttggcacctaagatgcctaatttcttttgtacttgctgaccatgactcaaagcctgctttggaataaagcgatcttcaagctgagcaatctggcctgctaactggcatagctcaacagccgataaatattgctgattactgcgcgctaatgctgctgcggtaaccattaaacccaaggcccaaattgcaccgcgatgtgtattgacaccatttgtcgccaacatcatggtcttttcaccttggcgaccgatttctccaatgtcttcacgcaaagctaaacagacttttccatgatgctttgcagcttgcgccatcgcatcaaacataggccctaaacttttcgcagagcgctccattaactccaaagtcaggtcattgtgtgcaccactgccacggcgatcgaccaaagctggtttcggtgtcagattaacttcatcaattaacgcttcgactgccatatctgccaaaagctgactatcgctgagcgtttgatattgaacttgtgccatcattaccaactcctgaattttgcaggtggttgatataagccatctgaccatgtcaccaagtcggcaatatttttcgctgctaaaagttcacgtgtggcatcggtacggcgaatacctaaatcttcagggaataccaccagaccttcacttcttaaacgtgctgttgtttttgggtcttgagttaaaccaatactggtcacacctgccaccgcagcaatcatggcttggcgctcttcttggctgcttgctttatatagataagcaatgccttcttcggtcagtaaatgagtcacatcatcgccataaatcatgatcggggctaaaggcaaacctgccgttttagcaacatcaatcgcatcgagacgatctacaaaagttggcttgcccccctcttgaaaggtttccaccatttgtacaacgagttttttaccacgtgccaaataggtatctgtttcattagcaccttgcaaacgcatatctaaccatgctggcgtatcatgacgacgtccacgcggatcatgtcccatgtttggcgctccaccaaaaccagctaaacgccctttggtaacggtcgaagaatgccccatgccatcaacttgcaaagttgcaccaataaatagatcaacggcgtactgacctgcgagctgacacatcatgcggttggaacgtaaagcgccatcacgacctgtaaagaaaacatcgggacgagcagcaacatatttttccataccgagttcggtaccaaaacaatgcacgctttcaacccaacctgtttcaatcgctggaattaaggttggatgcggatttagtgtccagtttcggcagatttttccttttaaacctaaagactcaccataggtcggtaaaatcagttcaattgccgcagtgttaaaaccaataccatggtttaacgattgcacattatgcttttcataaattccgcgaattgccatcatggccataagcacatgcactggcttaatgtgtttcgggtcacgagtaaataacggttcgatataaaatggctgatccgccaccaccacataatcaacccaagaagcaggaatatcgacacggggtaactctgagacgtcatcgaccagttcattgacctgaacaatcacgataccgtcactaaaagcagcaggttcaataagtgctggagaatcttcggtacttgggcctgtatagatattgccttgacggtctgccataaagcccgctgagagcaccacatttggaatgaggtcgactaccaaacgcgaatatagttcgatataggtatgaatcgcaccaatctctagtaaaccatcttcaattaactgactaatacgcaaactttgtgggccagcaaaagaaaaatcgagcttacgcgcaatgcctttttcaaacagatcaagatgttctgaacgccctacgcttggcatgatcatatgcaaatcatgcaaaatatccggattggtttgagccaaagagcgcgataaaaaatcagcctgcttttggttattcccttcgagtacaactttgtcacccggtgtaattaaggtttctaaaactttaataatgtcctgagttgggattaccacaccatcggtatattggtttgccatctctagttttagttgtttggcatgacgccgctttgtccataaccgttctttattctgaactgatccttccatgtacttacctatagatcgcagttttgttctgaatctataaaaacgctttatgggcttccgatcaatcaacctacttctttagttattaacttcaggttaatgatctattttaaggtggctgaaaaagaatttgagggaataggcacattaaatgtcttagataaatagactttttagaaaactggaacagcaactgttttgtatcaaattatcagatgatagaatattaaccctgattattcagctacaattacttgataagaaatagtttatgaaaaagaaatattgttatgcctgccaccaaaaacacctcaacattttcaagctgagctgttgatacttgcttactatataaaaactcagcacccaaactcatcaattaacacatataattaaaggctctcatgcttcaaaacaccatgcaccgccaagtattaattttggcgagttcccaatcacttttccaaaccgtttctgtcatggtcatgaccatcggtggcttggctggggcaaatattgcaaataccccaacacttgcaacgctgcctatcgcctctatgtttttgggtacggctttaatgatgttccctgcatcaatgctcatggcacgtgtaggacgacgtaacggttttctatttggcgcttttttaggtgtgctcggtggcattattgcatcaatcggcattttttatagttcactcatgcttctggctttgggtacgctatgtgtcggggcctatcaatcctttgctcagttttaccgttttgctgccagtgaagtggcaaatgatgcgttccgctcacgcgctatttcttgggtaatggcaggtggaattgttgcagcactgattggcccaactttagcacgcttcggcggacctttattccagcatttagaatatatcggttcatttttaattattagtatcatctcacttgtggcaatgggcattttatctaacctacatattgccgatatagttgagcagaaatccaactttactgctggtcgtccgtggcaacagattgtctttcaacctacctatttagttgctttatttggcgcaataacaggttatggcatcatgattttaggtatgactgccacaccaattgctatgcgacattcacaccatgaacttgggtcaattacgacagtcattcagctacatgtgcttggtatgtttctgccttcattctttactggacatttaatcgctcgatttggtgtgcttaaaatcatgtttgcaggtcttttattatttgcctgctatatcggatttgctctctcaggtattcagttcacatcttttgctatttctttaattttattaggtgtgggatggaactttttatttattggcagtacttctttactcacaggaacttattctgtggctgaaaaagccaaagcccaagctattaacgatatgaccgtttttgttgtcagtttgatttgttcgtttagtgcaggtgctttactggatttatttggctggaaagcaatgaatatggctttaataccatggctggtgattgccgcagcttctctcttctggctaagccaaaaaagagaaaagcagtttgtttaaattctttttaacgcggtttgctcaatagccattctagattttgacggaccgcaggccactcatgttttaaaatactgtaaacatgagtgtcccgcaaaatatcatctttcacaatttgatggcttcttagcacaccgtctagctttgcacccaagcgtacaatcgcggcttgactttgaacatttaaagaagatgtgcgtaactcaaccgcaatacagtttaaagtctcaaatgcatgagccaacaatagctttttacattcagtatttacaggcgtacgttgtgcagactttcgataccacgtcgaaccaatttctacacggcgatgtgcttcttcaatatgcatgagagttgtcatgcccagcgctcgccccgtttttcggtcttcaatataaaaaggcaacatagagccggatttttgcaaatcaagacgtctttcaatttcagcagtcatctgttcaggtcttggcacacgggtataccaaagattgtaaagctccccatcacaaacggcctctttgagcacttcagcttgagttacatctagcggctttaaaataacgtgttcacccaataactcaacaggtgtagtcaaagacatctttatctcctcaattgatattaagcttttatattttcaaaattatttatttaaatcagccacactgtacatggcattcgctatagtttgatgaccagatttcgataggccatctgccacgcctaaaatgtctcggcgttctttgttttgcccaagttttgattttccttgcagcttggtaatttcaatctcaatacctacaatggcttttaacatcggttcaagatagtcttttggtgcatctgacattttccatggttcaggttgagaagcttcatgggtgcgggttaagcgagccaccacaccacgaacataacgctcatcatctcgaatcgtcactttgccataagcatgcacaaccctatagttccatgtgggtacttgtctgcgctgttcatgtttagatggataccagtttggtgaaatataagcatcgcctgcttgaaaaacgaccaatacctcatctccatttttaatatcctgccaaacagaattatttcgtgacacatgggcatgtagcatgccaaatttcccttcatttgtttgcaactcgaatggaagatgatttgcatctaagccattacttccatgcgtaaaaagcaccccaaatggatgttctgtaataagagaatgcaatacatccaaacggttttctgcaaaatcatcagggatatacatggctaaaaacctcgctgtaaatatcagggctatttatattttgtgttgtaaattttctggtttatgtggtttattaaaaagaaccactttgtatttttttaagtagaccagaattatggcaagaatggcaaaagttgtggaacttccgtctattgcaaagattgataaaagcaaaggaaagataagtgctcaactgactcaagctttacgtgaagctgtacaaagtggtgatttacaacccggcgatccattgccttcttctcgtgaactggctttaaccctaggtgtcgctcgcggaaccattattgaagcttatgatcagcttttagctgaaggtgtgtttgactctcaaccacgaactggcacttatgtgtctcatgctttggttaaaacacctgtaatacaacattcatcaaaagaaaataaacctaactcgatatctttgaccaaatcggcacgttcatatgccaaagtgcttgatgaatttaaaccacttccccatgttccttttgcggtatctgtccccgttggacgtactcaaccaagtgatatttggcgtaaatttggtaataaatttagatcacggggagcaggtgctccatcaggttatggcgaacctcaaggggtattatcactaagaattgctatagcagactatgtacgacggtcacgttctgtccactgtgaacctgaacaaattgtgattacacccggcattcaacaatcactttatatttgcagccaaattttatttgaggcgaaagatgaagtttgggttgaagatcctgcttatcgcggtacaacagccatttttgagcatactgtacaaaacattcgaatggtgcgtgttcctgttgatgaagaaggcattcaggttgaaaccggaattaaactttctaaacatgcgcgtgctgcttttgtaacaccctctcaccaatatccacttggcatgccgatgagtctagcaagacgtacagctttattagcttgggcaaaacaacaaaatgcatggatcattgaagatgattatgacagtgaacttcgttacaacggtcagcccttcccatctttgcaaggcatggcacctgaccaagtcatttatcttgggactttcagcaaagtcttatttccatcgcttaggcttggctatgcagtgttgcctaaagaactggtagctcctttttgtgggcttagagtcttaattgatagacacccgcctgctgccgaccagcacgttttggctgcttttattcaagagggttatttagagcggcatatacgacgtactcgaaatgtctatgcagaagttcgagaatacattattggcttgattgaaaaatacatacctcaagaactggcttggttacagccaggcgatcaaggcatgcatatggtgttatggcttgctcaacatattaatgatattgacgttgcaagctcggcagtcgatgcaggtattgccatcaaagcaatttcaccgacattttcaaaagagcggcgacgttcgggtttaattgtcggcttaggcgattttgaacccgaactaatgcaacaagctatcaaaaaattatcaaagattattcaacagcacgccaagtcaatgtaggtaaaccttacaacagcaaccatagatgaatcgcaaatggtccaatgagtaccattaaaataccagcaataaccatggttaaactggcaatcaccccttcttcactattgcgctgctgtgctctaactgtaccaaaaccatgcgctgcgttacccaaggcggcaccatttgccacattagaacggattttagtaattgccaaaattgcatcgccacaaatcataccgaccaaaccggtaataacagtaaatagggaaaccaatgccgccgaaccatgaatatcttcagctaaaatcatggcaaaaggtgttgaaatagaacgtgccatcaaactgttggtgacttcagggctaaagtggaaccactgcgccattttataggcagtcatcacgcctacactcatgcccacaataatcgcaatcgtaagaactccgaggtttttacgaatcgtttcccgataacgataaatcggtatagcgaaagctaccgttgcaggacctaataaattaacaatccactgcgtatcttcagcataagtttgatatgaaattccaaaaatcgtcatcaaaatgatggtaagtacaggcacactaattgcgggtgataaccaaagttttggatgtttctgatagattcgctttgccacaacataagcgaccaaagtccagatgagacaaagaattgaccagatattcatgtcattatgctctttagatatgcttatgttgaagacgttttctagcctgtaagtaagccttcaaacgattgtaataatgaatagtcagtgaagtgcttaacatgactaaaatggttccaaccgcaatgcttaagacgatttgccatccttcggtcataaacagggttttatactggacaacggcaacgactacaggcacaaaaaacagtaatagctcacctaaaaccacagttgctcccattgccacctgatccattttgataattttaaagaacaggcataaaagcaataaaaacatacctaaaatacctgccgagacaggcacaccgagtttttggtgtaagagatatccgatccaccaaaatccagccaaaatgagaatttgtttaactaacacgaacagtgatggttgtgagggtgttccagaagcagattcagtactcatttttcgaaattaaatggttaactacactattatgctagcttggttaaacctgctaaatatgaattattcatgttaatattattccaaaatggaataatctattctttattatgctttctctaaaatcattacagtgctttgttactctggttaaaactaaaagttttacccgtactgctgaagagttatatctgactcagcccaccattagtaaaatattacaacaactcgaagagcagcttcaggtacagcttttggttaaacccgatcatggacgaaaaagacaaattgaattaaccgaaattggagaacgtatctatcaacatgcggtcgagcttcttcaggcagagcaaaacatctttcttgaaatagaaaactatcaacaattaaaaacaggtactttaaaacttggcgttccacctttaggttcgcagctcctaacgactgccctatttgactttcatcgccaatggccagatattgaattagcttttatggaagtgggttcacgcggtattgaacaggctttactcaataatgagctagacgttggtgttttattgcaaccttttgatgaacaaacttttaatagcatcgagttatgtaactaccctttaatggtacttttacgtcgtgatgcaacttgggcaacccgcaaaaaaataaatctagaagagctacaacaccaatcatttttaatgtttcctgaaaatttctctttaaacagtattattctcgatgcttgtaagcagcatggtttttacccaaccattgcttgccgtaccagccaatggcatctcttggcagacatggtgttacaacgtatgggaattgcgcttcttcctcaatattatacagacatgcttgacccaactttatttgcagcagtgccactcgaaaaaccaaatattcagtggcacttagtgatggcttggaaaaagaatcttcctgtctcaccagcagtacaagcttggcttagcattgtccgtcaacattttcagcacattaaaccctaacgttgaccactgaaatagcttagttcaaaaaccgataaagcttttccacaaaaaagctacccaatcttggcttagctcacttagactagacccatctgtttatcacacggacaataacaatgaataacgagtattttaagctgtatacagattcacaatttctaagtccctatgcatttacagtttttgtaggactacatgaaaaacaaattccatttgaaatagcagccatcgacttaggtcagcaaggccagtttgaaacatctttcgtagaaaagtcattaacagctaaagtgcctgtacttgagcataacgattttgccttatcagaatcttctgccattttggaatatttagaagaactttatccagacacagctatttatccaaaagatattcaagctcgcgcaagagcaagacaaattcaagcatggctcagatcggacttagtggcactaagaactgagcgtccaaccgatgttatttttattcagcccaagtccactccactttcagaagaaggcaaaaaagcagccgagaaacttttctttgttgcagaaaaacttcttgcgtctgatgccgaatttctttttggttcatggagcattgtagatgctgaacttgccctgatgttgcaacgccttattcaaaatggtgatgctgtatcagagcgcctaaaaaattatgcattacagcaatggcaacgtccgtctgtacaaaaatggcttgccttgcgacataaataaatccttatatttacaccaaacatgagataaaaaatgagtgattcaaactatattcctccacaagtttggcaatggactggagagaaaaccgatttaaaccaacctacctcaggtgctcgttacgaacatgcacttccagtagggaaacatccgctccagctctattctttagcaacgcctaatggtcaaaaagtcactattttattagaagagcttttagctctaggacaccaagatgctgaatatgatgcttggctgattaaaattggtgaaggacagcaatttggtagtggctttgtagaaattaatcccaactctaaaattccagcattggttgaccatagccaaaacccgccattaagagtatttgaatctggctcaattttgctttacttggctgaaaagtttaaagcattcattccgactgatattgctgcacgtactgaatgcctcaattggttattctggcaaatgggcagtgcaccttacttaggtggtggttttggacatttttatgcttatgcccctgttaaaattgaatatgcgattaaccgctttgcaatggaaacaaaacgcttacttgatgtattagatcagcatctggcaaaaaacgaatatttggctggttctgaatatagcatcgctgatattgcagcgttcccttggtatggcggtcttgttaaaaactgggtatataacggcgcggagtttttaggtgtcgatcaatataaaaatgttcaacgttgggcagatgcgattttagagcgccctgcggtacaacgtggccgtatggtcaatcgtacttttggtgatttagccacacagttgcatgaacgtcatgatgcgagcgattttgagaccaagactcaagataaattgcagaatcagtcttaaaaatatcatttagtttttgacttacccgcaagatatttcatttttgcgggtattcaaagttggcaaaatagcccgtgtataactcactcagccaagcgacaaaaactcgtacgcgtggcgagagctgccgatgctgcggatataatgcagaaactgacatcttcgggatttcccactcagataaaacctgaaccagacgcccattttttaattcatttgccacatggtagcgcggtacttgaattaagccagccccttgtaaggcagataatacatagttttcagcatcatttaccgcgatccaacttttcaaaaaataatcttgttttttgctattcaccatcaattcaaatgggtaattccgtccgcctgatgtcgaaaagaaattgacacaataatgtgataataaatcttctggttgctgtggcgttccatgtttatttaaatagtcaggacttgcacaaatcacttgtggcatatcggccaaatgtctagcaattaaagtggaatcatctaaacggcccgctctcaccacacagtctatcccttccctaatcagatcaactaagcggtcacccgtactgattaccagttcaatgtcggggtataactcgtgaaattgatctatattgggtaaaacaattttagttgcatgtgcgcctgataaatcgacacgtaataaaccacggggctgagcaattacattgcgtaaagatgattcggcatcatcgagttccgataatatttgtgtacaacgctcataaaatgcctgtccatctagtgatggtcttacatgtcgagtcgtccgctctaataaacggcactgtaaattactctctaactccttaatggcattacttgcagtagcacgtgggatatttagctgatcggctgcctgactaaaactacccagctctacgatgcgggtaaaaagttgcaaggtatcaaatttatccatggtgctcgcttttaacccttcctattattaatttatatggaattatcttatccaattctgatgatttatcccatatttctatattattaaaataagccatacttactcaaacaggcaatctaaaaatgaatatttcaataaaaacagctctggttactggcgcatcacgtggtattggccgtgctattgcagaacgcttagctcaagatgggttttatgtgattattaactatgttggcaataaagcgcatgcccaagccactgtagaacatattattgagcaaggtggtcaagcctcagctattcaagcggacgttgcaaatgaacatgaggtgagccgtttatttcaagaagctaaagcgattaacgggcaattagacgttgtggttcatagtgctggtattatgcctatggcaaaaattacacctgaaagcctgccagatttcgataaagtgattcataccaatttacgtggcgcgtttttaatattggcgcatgcggccgaaacagtgccagatggtggtcggattattgcgctttcaaccagtgtaattgccaaatcttttccggcatatggtccttatattgcttcaaaagcaggtgttgaaggtttggtacatgtgttagcaaatgagttacgtggacacaatatcactgtaaatgccgttgcgcccggcccgacaggcactgaccttttttacaatggaaaaactgaagagcaagtggcagctattgcaaaacttgctccattggaacgaatcgggacacctgacgaaattgctggcgtagttgccatgctggctggtccagatgggtgctgggtaaactctcaagtcatccgggtaaatggtggatttgcttaattttaaaaaccgtgcggattattttaatctgtacggttttttactaaataataaaatttcttaaatctattttattttaataactttataagattaactaatacttttttatataaaatattcaccgctcttatttatcaaaataatatatataaatagatattccttatttttgcttatatttaaaaccgcgtaaattgaaccttaacaatctgaatcaaagataaggatatattcaatgaacgctaaattaaatactgaaactccgcaaagttttatctcaaatggttcaaatacgtccttttcagccgaagatatccttgctaaagcacagcaatatgcacaagaacacgaactaaattttagtggcagtttatcacctgttgacgcatggcaactcgtacaacaaggagaagctgttttagttgatgtgcgtaccaatgaagaacgcaaatttgtgggttatgtccctgaaagtatccatgtcgcttgggcaacaggcacgtcatttaatcgtaatccacgctttttaaaagaacttgaatcaaaagttggtaaagacaaaaccattcttttgttatgccgtagtggcaaccgttcagcacaagctgccgaagccgcatttaatgcaggttttgaacacatttataacgttcttgaaggctttgaaggtgatctaaatgaacagcaacagcgtaatcagaaaaatggctggcgcatccaccaacttccttggcaacaagactaatacttcaatcaattttcagtgaatcaaggaaagcttgtgactcaatggaacattaatgcggttgtacaaggtttacaacaagcaaggcatgactggcgtcagcagcaacacaggaccaaagaatttgggggccgtgaacttccatctaaagaagctttaaaggccattttagatgacctgtgcgggattttatttccaatgcgtttaggccctgccgacttacgtcaggaaactgaagattcttatattgcctatactttaaatcgggtactaacagctttatatgctcaagtacaattggctttaaattatgaagcgaaacgacatttgagtcattcaagcccagtgcagcagccacaagaacttgctcaaactattgtgcaggattttgccaacactttgccctctatacggcgccttttagacggcgatgtgcgggcggcttatgaaggtgatccagcagcacatagtgtagatgaagtattactctgctatccgggcatatttgcgattatctatcaccgaattgcccatcagctctatgctcaagtgcctttattgtcacgcattatttcggagttggctcactctgcaacaggtattgatattcatccgggtgcgcaaatcggtaaaggatttttcattgatcatggtacgggtgtggtgattggtgagacttgcgtgattggagaacgcgttcgtatttatcaagcagtgactcttggagcgaaacgctttgaaaccaatgatgatggcgctttgaaaaaagactatacacgccatccaattgttgaagatgacgttgtgatctatgcaggtgcgactattttaggtcgtattaccattggccgaggatcaatcattgggggaaatgtctggctaacccatagtgttgctgcaggtagccagattttacagtcaccgaatgagtcttatcaaaaaaatcatattgccggttaaaaactatagatgtgaaataaatagataaggagataaataaacaaagaacgtgcagattaataaaatgcttatttctagtttaaatatatttttatttagaaaatagataactcattaataagctcagtatttaaaaaatttataacgcgattttaattttaaaaccagaactaattctagtttatatgcatcctagaatttttattttcgaaaagccaatgtaataaggaaaaatgattcatggcgaaaaatacagacaaagcccaacttgcacttggggaccatgcggcccgtcaactggccaatgcaaccaagacagctccccagctttctacaattactccccgctggctgactcacttacttcaatggattcctgttgaagcaggtatttatcgcctaaaccgtgtcaataataccgatgatattcaagtagcttgcacacaacgtgatgaagcaactttacctcaaacttttgttgattatgacccagagccacgtgaatactttttaaatggtgtatctactgttttagatgtacatacacgcgttgccgacctttacagcagcccacatgaccaaattaaagaacagcttcgcttaaccattgaaaccattaaagaacgtcaagaaagtgagcttatcaataaccctgaatacggtttactagcaagtgtgacagatgaccaacgtatttcgactttaaatggcccacccactcctgatgatcttgatgatttgctacgtaaagtctggaaagaaccgggatttttcctagcacaccctgatgcgattgcagcatttggccgtgaatgtacacgccgtggtgtaccgcctccaacagttagtctgtttggttcgcagttcattacatggcgcggaattccacttattccatcaaataaaattcctgtagaagatggcaaaactaaaatcttgctgcttcgtgttggtgaaaagcgtcaagggattgttggtttgttccaaccgggtcttgcgggtgaacagtcaccggggctttcagtacgttttatgggaatcaaccgtaacgcgattgcgtcgtatctaatctcattatattgctcacttgcagtattaacagacgatgctttggcagtgttagatgatgtggaggtggacaaatatcatgactacccagttaactacaagtaatctgcaaggtagtccaacggggcctgaagtgactggtgttaacccaccagccaacttccctgatgagtccaccattgctcgacttgctaatgagtttttttcagcagtgccaagctcaagcagttcgacttcttcatcgggccttaacttggacttacctgtcggagcgccacctcacccaccgcaaccgggtgaaccattttctgcactcagtggtcgtgcgcccaatatcgcctttcagaaaagtctcaatccggaatatcctgagcatattccaaatttgccagactaccctgaacgccgaattgtagcgtctgcgcctgtagtgggtggagctaatttgccacgcccaccatttgaaccacacttaccacaagctgctcatagtgaacccaatgtgccacgcattgaacccagcttaccaacgggtgcaggtgaatcaccttattattttttaaatgatttttctgcccccaatgcaacagaaccatctgttaaaggtgttgaagataattattcggttgcacagtcatttcaattaccacatggtgaccagctcaagtcattactgacggaagatcgttttgcaacgaacacgcctacccaaagttcagcaagctctgcattttattttttagacttgcctcaaagtggacaaagttatagtcactatcaaccatcacaacctacttttgtggtaagcagtgcgcaaccactcgatgtgcatgccatccgtcgcgattttccaattttgcaagaacgcgtcaatggccgtccattagtctggtttgataacgccgcaactacacaaaaaccgcaacgtgtgattgatcggattgcttatttttatcagcatgaaaactcaaatattcaccgtgctgcacatgagttagcagctcgtgcaaccgatgcctatgaacatgcgcgaaatgtggttgctcgatttattggtgcaccctcttccaaagagattatctttgtacgaggcaccaccgaagggattaacctgattgcaaaaacatggggtgagcaaaatattggtgaaggcgatgaaatcatcgtttctcacttagaacaccatgccaatattgtgccttggtatcaactcactaaaaaaactggagcaaaattacgagtcattcctgttgatgacacgggccagattattttagaagagttaccgaaactgattaatgagcgcactaaactgctgtcgattactcaagtttcgaatgctttaggcacagtcacacctgttgctgaagtcattaaaattgcccatgccaaaggtgttcgtgttttagttgatggtgctcaatctgtttcgcacatccctactgatgtacaagctctcgatgcagacttttttgtgttttctggacataaagtgtttgggccaacaggtattggcgcggtctatgcaaaaccagagctgctagaaagcatgcctgtttgggaaggcggcggtaacatgattcaggatgtgaccttcgaacaagtagtttaccaacctgcaccaaacaagtttgaagctggaactggaaacattgccgatgctgttggtttaggcgctgcgcttgaatatgtcgaaagtctaggcattcataacattgctcgctatgaacatgatctactcgaatatggtcaaaatgcgctgagcagtgtgtcaggtttacgcttgatcggaaccgcacatcacaaagccagtgtaatgtcctttaccttacaaggctattcaaccgaacaagtcggtaaagctttaaatcaacatggtattgccgtacgttctggccatcactgtgctcagccgattttacgtcgctttggcgtcgaacagactgttcgtccatctttggctttttataatacgacagaagaaattgatttattggtgtcggtgttacatcaactgacgcgtaataggcgtaccagttaaatttattaaaaaagactgctttcgagcggtctttttttatggattctttattgaagctactttagctctaaagtcatatatagatgtaataagtcaaagtagttatcacggcggaatcttattatttttaaattcgatttctaagttagccttcggctcgagctaaaagtcattaatactctagacaatttaaagtaattatcacggcggagtcttatgatttgaaatttgattcctagcttagccttcggctcgtgctaagagtcatctacagcctgcccataatttataaaaataatgtttttgcaacatttcctgatagatgaaaacagtgagcaggttctgtagatgacaaagttttttggttactttttccaaaaaaagtaacagagttagctactttcttccaatgtataaacggtaagactccgtcgcgctaccccatccacttataaataaaattaacttaaacaaacaaactccaaatcaatctcaatgcaatcccaatcaacaacactcccatcaccctctcaaaataaaccccaaactccaaaaatcttttacgtacgataggctgtgcaaacagtacactcaccaccataaaccagatagcattgaccatacacatccatatcccataaaaaacctgaactttcatcggtgtggtcgtacttacaatcgtcgtaaaaattgccagaaaaaagatagtggctttggggtttaacgcattggtaagaaaacccatggtaaacgctttaaataaacttggcgtgtcactacctgcttggccattaatttcaatattggtattcggctggctacgtaaacactgccatcctaaatacactaagtaagctgcccccgctgttctgatcagtgacatgagccattcgctttgttgaatcaaaaagccaatcccaacaagggtataaaaaacatgtactgaaatcccgacaccaataccaattgcagtcagacatccaatcaaatagccataacgtacgctttgccttaccgtaatcacaaaatctggtcccggtaaaatcaccgccataaagtgaataagagctagcgttaaaaactcatgcccatacatctgccacataacaatttagtttcctgaaaatcacctaaaagattgtattgcgattttttaaacgcgataatccaatcaaaatccaaataacttttgcctcatgagcacaaatcaaagtccggttctgttaaatgaaatggcgaccttcgttaaggttgtcgagtcggaaagcttttctgaaactgcacgccagctaggtacaacaccttctgctgtgagccgcgcgattgcccgtttagaacgtgctttaggtacccgcttactctatcggactacacggaaacttcgtttaagtgaaagtggtcaacaggtctatcaacgttgtttagatatggtaaatgcggcacaagcagtcatggaaagttcaggtcaatttcatgtcgagccagaaggtattattcgtatgagtgttcccaaagctgtgggacattttatgattcatccgcatttacccgagtttttagaacgctacccgaaaattgatatacaaatgcttttagaagatcgttatgtagatctcattgatgatggagtcgatttagcacttcgaattacagagcaaccatcaggtggccttatgggtcgaaaactcattgatattgatcatttggtttgtgctacacctgaatatttagcaaagcatggcactccgaaccatcctcatgatttaaagcagcatgaatgtatctacttgggtgaacaagccagtgactcaaaatggaaatttcaacaaggaaataaatcgataagtgttgccgtgcgtggtcgttatgcagcaaaccatacgggtgtgcgtttgagtgctgcattacagcatttaggtattgcgagcttgccatacttcgttgcacgccatgctctacaacaaggtactttagttcaggttttaccagattggtattttaagacctattatagcggtgggctgtggttactctacccaccgacacggcatgtcccgcctaaattgagtgtgttgattcaatatttggcagataaattagcagcagagccgactttatttaagttaaagtaatataaagtcaaagaattagcacgattgaatcctacctttaatctctaaagcaatcagctaattctgttacttttttttggaaaaagtaaccaaaaaactttctcatctacagaacctgaccactgtttacatctataaaaaatattgcaaaaacattacctttataaattatgggcaggctgtagatgaatcttagttcgagtaaatactatctagagttctaatcattagaggttattagcacgattactcaaccaataaatcttttggattaatcgtatcgccatagactggttttaaggttttttcataagcctgatgaatcacgccttcttttgccagtttctctaaatcttggttcaaccagtctaataactctttatcaccctttttaactgctggtgcaattaagtcctgctcacctaaattggtaatgccaacggtgtaatttggattttctttagcccacgctaaaaccagcaagttatcatgggcaagcgcagcaccacgtccatcttttaaagcatcaaaagtttcagtgttttgttcatacttttgtagtttaatttcaggatgcgtcttggtgaagaatgaatcagccgttgtacctttgtttactagcaaggttttatctttaagttgagctacatcggtaattggatggcttttaggagaaaccacaccgagtgccacttttaggtaaggcttagcaaaatcgacaacttccttacgttctggcgtaacagtaaagttggcaaaaataatatctactttattggcttttaaatattcgacacggttagccgcttcagttaaaacaaactcaactttgttttcatcgcccagcaaatctttagcgacatgcttagcaatctctacatcaaaaccttgatttttaccttgagcatccaaatatccaaacggcggtttatcactaaatacgccaattcgtaccacgccattctttttaatctgttcaatactcgatacagtttgtgtggtatcggccgttttttcagtagactgagttcctttgtcacatgcaaccaaacctaaactcagtaaagacgcagctaaaatatgcttcacgttttgaaatgttaatgttgtcattatttcaccctctcgttcttgtaaaagtcttatttagaatcgcagcgcctacttttaggcactgctctagcgatatcgaaaattattgacctacatctaaaaacacattcggattgactgaatcaccgtaaattggcttcaaggtttcatcataaattttcttaatttcaccgcttgttctgagctgcttaatttcagtattgagccaattcaatagttgggtattgccctttttaaccgctggtgcaataaactcttgatcaccaatagactgaatacctgccacataacttgggttcttcgcggcccaagccaaggcataagtactatcttgtgaaatcgcgtcaccacgaccgtcggttaaggctttaaaagcatccgaatttctttcgaacttgagtaaattcacttttggataatgcttggtaaagtacgtatctgaacttgtgcctttgtttacaattaaggtcttaccttctaattgagcaatatctgtaatcggcttggctttaggagatactatgccgaaagcaccttttaaataaggctcagcaaaatcgacaacttccttgcgttcaggagttaccgtaaatgtcgcgaatacaacatcagctcgatttgattttaaaaactccacccgatttgaagcttcagtcacaataaactcaactttcttttcatcaccgagcaaatctttagtcactcgttttgctaaagccacatcaaagccctgattattacccgcactatctacaaaaccaaacggcggatcatcggcaaaaacggcaactcttagaactccattttttttgacttgttctaaagaatggtctgcttgagcattacttgcctgttcagttgatggcgttttactacatgcagttaacaacaccccagcaacggcaagactgcttaatatttttattgaattacgtttaaacattcacttcctcatgattcaaataataaaaatttagtacgacaaaatatttaagaaagctttcgctcgttctgtttttggctgttcaaaaaattcttctggtgaagcctgttcaataatcttgcccttatccataaaaatgatgcggtcagcaaccttacgggcaaaggacatctcatgtgtcacaatcaacatggtcattccttcattcgccaatttgagtactacatcaagcacttctctcaccatttccggatcaagcgcagcggtaatttcatcaagtaaaatcacttgaggttgcatgaccagtgaacggacaatggctatacgctgtttttgtccgccagaaagttgtcgcggataatcaagttttcgctcatatagcccgactcgctttagcaactcatctgctacttgttctgcttcatcgcggtgacgtttttgtactttaagtggcccgagcaaaatattgtcaatgacgttcatatgcccaaataactcatagttctgaaaaaccatgccaattttttgacgagcattagtccagtccacatctttgcccaaaacacctgagcctgttaaacgaatctcgccaccctgaatcggttctaagccgttaatacagcgcaataaagtacttttaccgcagcccgatgggcctaaaataacaaccacctctccttgttctacatccagatcaatgccctgtaaaatatgactttgtgcaaatgatttctgtaattgttgtatcgataacaaaggcataattactcccagaccttttctaaatgtgccgccaaacgagataagggatagcaaatcagaaaatacaaaataaaaataaagccataaatccaaagagaagcgcttggcacggtcaacagcgaattttcaataatttgctggccaactttaatgacttcaaccacgccaatcaggactgccaaagagctggttttcaccattcgggtaaataaattaatcgcgcctggtgttactcgttttagactttgcggaaaaatgacgtagatcaaagcttgaacatgagttagtccgagcgcataggccgaatcgcgttgatgctgatcaatcgaagtaatggctgcacgaaccaaatcgcccatttctgccgtaccccataaaacaaatacaacaatgcatacccacattgctgaaaactgccagttaaaccatgtcgcaaagccgaaataaaacacaaatagcaaaactaaaattggaatgattcggatcgcttctagatacaggcggcacagcgctttaacgactatattcttagaagtcataatgacgccgaagactgtcccgaaaattgcagagaaaaacactgaaataaatgcaatttttgcagttgcccaaagtccccacattaaacgttcgaggtgactcgcttgaaataaataatcaagttccatggctcaccttccgacttctgtgctctagatagctggttaaaatagacacgggcaataaaataatcagataagccatgataagtaagaacaaagcttcggtggttttatagtccataccaattaagtctttggtgacaaaaagcagctcaacaacagcaatggcactcaccacagaactttctttaattagaaataggcaatttgcccctattgccggaattgaaatggcaagcgcttgagggaaaatgacatatctaaaaatttgagtcggttttagaccaatactttttgctgagtcaatctgcccttttgcaacagactgcaaacccgctcgaaaagcttcagccatatagcttccgcctaaaaaggtcagtccgatcacaccacaggcaaaaccatcaattttgataccgagttttggcaaaccgtaatacaaaaagaacagttgaattaataaaggggtatttcgagataactcaatatagaactgggcaattctatttagcacccgcacgtgatatgtgattaaaatgctgcaaattagccctacaataatcgccaaaataatgctgataattgagattttcagcgtggtcaaagttgcagagaaaaattgcggcaacacactatggatatactgccagttcaaggaaaattccaacaaataatattaaaacgttataaatatttagctttcgtcagccattaaatatttgtgtaacaagtttatttttttcccaattggtctaaaactatttttattagataagcttttctataagtttgataaattcgatttggcaatcgaaaaccttcaaatcagttgaatagaacagctcaaaacatgttcactaaagcaaagatgagtagtaaaactaataaaaaaaatcggacaccaaggcccgatttttattaaatgatttttaatctattgtttattttctaagtacatcaccaatgcttgggtctttatcaaaaaccgattttgcatatgggcaaagtggaattacttttacgtctttttcacgaacaaaggcaaccaaagcatcaagtaattggcgacctacgccttgtccacgataattttcgtttacatctgtggcatcaataattagcatgctttcgcctgcccatgtataagtcatttcacctgcaacggtttcaccatcaagtaagctaaagctgccgtgttttgtatcatctttttgttgaatattcacaatgaattcctcatattacaaatcgtatttatttaaaaatgactttgtataatctttatctataagaacaaatttaactgtaaaaaaatagcctatttttagcagtgagtctgtatgctttttaaatacaatcttcacttaaattagtgaaactcttgcaccaaactattaatatgcgccaccgcagcagttcggttttcaacgcaaagtttttcaaaaacatgctctaaatgtttattcactgtccgtggactaagctccaaaatttctgcaatgtctttattggtttttcctaacaacaaccagtgcatgacttctgcttcacgttgagtcaactgcgggcaatattttaaaatatcagccatttccaaagctggcgtagaagtttttatctggataagataattttttgccacacttggttcagtttcccacggtgtaagcaataaaagctgtaattgctgagatggtgttgaataagaacagctggttaattttttagggtctttttcatgctctaagtctgaaaaccaagcttttaagcctgcttcaaaaccttctaattcaggtaaatattgatttagtagatcactggctttttgggttttccacacaattttaccgtgaacatctagcgcaagaatggctgtttccgttgcatcaatcacctgtttctgttgctgcaatagtttggcatgtgccaaatgtgtttttacccttgctaatacttcttcaatattcagtggcttagttacgtagtccaccccgccgacctgaaaaccacgcacaatatgctctgtctcagacaaacctgtcataaaaataacgggaataaactgcgtaattggactcgctttaagctgtatacaactttcaaaaccgtccatatgtggcatattgccatcaagtaaaatcatatctggtaagcatcggtgtgcaatttcaattgcacttaacccatcggttgtaacaagcacgcgataacctgcctgatccagactttcatgtaacaagcctaaattttccggcacatcatccacaatcagaataacagcctgctcgtttggtgaagcttgctgaaaagaaacatgttgcgtactcattgcttatcctgaattaaccgttgggcgtgttttaaatcaaatttttgaatcgcctgttcaagctgttcccataactcgttatgctttggaaaattttgacgacattgcgttaaagtctgttgaattccacgaatgtacccctgtccaatcaagtcatttaactgttgtaagctttgcggaaaatcgagcagctcattattttccggttgttggattagcgtatgaacagcaacttgctcttgcttatatatatttaaatcgagtgcttgaacttcattattttcaaggagtgtctctgatttggaatcaatccacaccaagcccaacttatctccaattttactcagcaacaaattgagatcgattggttttaacataaagtcttcacttaagaccgcatcttgtggattgacttcacgctctcctgcattcgctgaaataattaagatcggcacattggtaatattattctgacgcaataatcgtgctgtttcccacccgcccatcaaaggcatatttaaatccatcaaaatcaggttcggctgaaaaataggtacacgtcttaaacaatcaatgcccgactcggcttcttcaatcataaatcccaaaggtttgagaaaattagcgactaggcctcggtccacagcttcattatcgacaaccaaaattcgttttcgttcgccttgataacccgtaatttggttggagtagacattagaaattggatgaactacttcttttgaaggtaaataaaacttaatcttaaattgtgaaccctgattgagctgactggtcacagatagctggccaccgagtaaatcgaccaacaattttacaatgggtagtccgagtcctattccggtaaatccgccttgtactacattgctgccccgttcaaacgggttaaagattcgctctaaatctgcctctgcaataccacagcccgtatctctaatttcaaaataagccgtttgaaaacggtattcgacttttaaagtaattgtgccgcttgtcgtaaactttaaagcattgcccagtaaattgatgagcacttgctctaagcgttttttgtcggtacgaacgtagtgcggtaggttttctccaatttcataaacaaactgtaaattcttctgttcaaactgtggctgaaacatttgaataatctgttcaataaaattggggaaatgcacatccactacatttaaagaaatcttgcctgtttcaatgcgtgctaaatctagtaaaccgtcaatgagtgaagtcaaatgctgcccactacggctaatcaccccgagcgccattttgccttgttcagagagttgttcttgtttttgaagtaattggctatagcccaaaatactatttagaggcgttcgtaattcatggctaatgccaatgacataacggctttttgcatcattggcccgttctgctgctattctggcgtcttgtaagtcttttgaagtgacttcatgggcagcaatttcatcaatcaataatgctgtttgctgatgcgtttcgatttcggcattacgtcggctttcatcgtttaacactaaccaccatgctgcaacactcatcaataaaaataaaatggtgtaaatttttacaaacagtgtaaataactgcggaacggctgcggcattaatggtttctaaataggttttttcttggatataaaccagactcaagctcactgccaaaacaatagacagccctagagtcagtaataaatataaactgaccctgctatttaaacggctcgcccaacgttctggtaaataatgccaaatggcttttttgagttgtactgaccaacgtgcatcgggtttacataaatcgtggcagcgtgcttctagtgaacagcatagagagcaaatcgtaccgttataggctgggcaacccgccatatcagcaagctcatagtcccgttcacacacgacacagttagcaaccaaagtcgcctgaattttttcaggctgacgtgcaatgtaatatttgcctgtggttaggtaagcaataacaggaacgcataaaaccgcactccccaaagcaataaaacttgctaaacctttcgccatgagaccgaaaaagcccaaatagctcagcatcgataacactgaagcgatgagtaatgcgcccacacctacggggttaatgtcatataaataagcacggcgaaattcaattcccttcgggcttagacctaaaggcttacagataattaaatcggcaacaacggcgccaatccatgccaaagcgatattgctatatagtcccaaaatgcgttcaactgcatggctaatgcccatttccattaaaacaatggcaataaacacgttaaaaagaagccagacaattcgtcccggatggctatgagttaaacgagcaaaaaagtttgaccaagctaaagagccagcgtaggcattggtcatattaattttaatttgtgccaagcaaaccagtgctagagtcaatattaacgctagctgaggatttggaataaactgctgataagcaacccaatataaataagtcggattgtctagttcagagacaggaataaacagctgaaaagccaacaccatcagcagcatgcccatcaaaacttttaaaaatccaaaaataatccaagatggaccacctaaaaaaacggcaaaacgccatgcagttctattcttttctttttgcggtaagaaacgtaaatagtcggcttgctcaccaatttggatcacaaatgaaaaaataagagtgcacgccgcaccaaagtaatacagattaaaatcggtcgagtttgaaactgccccaacaaaatgcagactactacttaaaatttgtggttgtttccaaagtacaaaaaaccacggtaataacagcaataagagccagattggctgagtgactgcctgaactttgttaataaaaccaatgcctttgaccactaaaggcaaaatcactaaggcagaaattaagtaaccaataacttgcggaatgcctaaggccagctcaagtgccatcgccataattgcggcttcaaacgcaagcaaaataaaggtaaagctggcataaatcagagatgtaatggtcgagccaatgtagccaaaacctgcaccacgagtaagcaaatcaacatctacattatattttgcggcgtagtaactaatcggccaactggttaaaaatataatggtacatacgacaattgctgcccataatgcattgctaaagccatactgccaaagcatggttgccccaatggcttccatagccaaaaagctaactgtagaaattgcagtattggttaccgtccaaggcgaccattttcgtactgaggtaggtgcatagcggagtgcataatcttcgatactttcatctgccacccaaatattatattcacggcgtgttttgatcacacgttgtggcgcttgttggggacgtgaagtatctggcataacactcatgttttggatagggctgcattaaacccagcaatccttatgccaaaagtcatttatcatggcgattttttctaatacgcacatatacgcaaaataacgtattttcaatttttcccaaaaatcacacactcaaaaccatcaaaaaacaatgatcaatatttgtgttgattgaccgaaaatgattgggagattgatgttatgagtgtatctgaacatccaaatctggacactgtgcaaggtgcagattcacaaaaagcagtgaatgaaaccttagaagattatactttacgttatgctccacacagctttcggcgctggagtcccaaagttgttgctattactgcacttggtggtattgcctatcttgctgacttttctattggtgccagtattggtatgtcttatggaacaaccaatgctgttttctccattttatttgcagcgattattatcttcttaaccggcatccctttagcctactacgcagctcgctataacatcgaccttgacttgattacccgcggtgcaggtttcggttatatcggttcggtcctgaccagtatcattttcgccagtttcacctttattttctttgcccttgaaggttcaatcatggcgcaaggattattgctcggtttaggcattccgctttgggctggctacctcatctcaaccgttatggttattccgctggtgatttacggcatgaaagctttaagtaaattacaagtctggactaccccactttggctcgttctgatgattggtccggtggcttatctgatttaccaagaacctaccttagttagccagtttgcaacgtttacaggtcatgaaggttttgcacctgtagatatggcagcgattatgcttggtgcaggtatatgcttatccctcatcatgcaaatcggtgagcaaattgactacctacgcttcatgcctgcaaaaacaaaagaaaatagcaaagcatggtgggcagcggttatttcagcgggtccgggctgggtaattttaggagcgatcaaacaaattattggggcgtttttaggtttctatttactcactaaaataccgggcgtaaacagcactgaacctgttcaacagtttaatgcggcgtttcatgacatgcttccgggctgggcggctttaacacttgcggttattttggtggttatttctcaaattaaaattaatgtgaccaatgcttactctggttccctcgcatggacaagtgcctacactcgtattagcaaacattatccggggcgtattgtctttgtgatcgtaaacttggcaattgcgcttgctttgatggaaggcaacatgtttgcggtactgggtaaaatcttaggattctattcaaactttgcaattgcatgggttgtggttgtcgcaacagacatttcaatcaacaaatatgttttaaaactttcaccaaaagaaccggaataccgccgtgacatgctctacaacgtaaaccctgtcggtatggttgctttccttgtatcagcaggtttatcgattgcagcattcttcggattattgggtagtttcctagcgccttactctccaattattgcacttgtacttgcctttgtattaacaccaatcatgggcctattaaccaaagggaaatactacatcaagtcacacgatgacggcgttaaagaaccacgttacgatgctgaaggtactcctgtagcaactgtttatcactgccgcgtatgtgagcaaggctatgagcgtccagatattatgttctctcacaaacataacggtacaatttgttctttgtgtaaaacactcgatgcttagccccctttaccaattaaaaaagaagctttaaagcttctttttttttacatctgatgatttagccaatcggaaataagcgctcaggtaccacatctttcatcacaatggttgagatgagccgttgcacacttggaatagcagataatttttcgtcatataaacgctgaaaagctggtaaatctctagcaacaacatggagtaaatagtcaggttcaccaaacaaacgctgcgcctgaataatttgcggaatctcaatcacggcattttcaaacttctcaaccgcctgtttatcgccttctttaagcgtaataaaaacaatcgctgaaaactcaaaaccgactaagtttgggtcgagttctgcccgatagcctttgatagctcccgactcttctaaagccttcactcgtctgtgacaaggtgaaatgctcaaaccaactttttctgccaactcagtgatagataatcggccatttaattgcaattcagcaagaatctttttatctgtgcgatccatttagaaaaatttaccccaaatgcatatgatatgagcaaacatttaaaagcacattctaaatacatgagcatattattttcaacaagctcgaataaatagggattttttctaaaccacgggcgaaacctttggaaaatagtttgccgagataagcatatggcttttaacatttttattgcattttggagtgtctccattctttttattattacgccaggggcagactgggcctacgccatttccgcaggtattaagggtaaagtcgtcgtccccgctgtcgcaggtatgctatttgggcactttattacgattttattggtagcggctggtgttggtctgcttgtagcaaataacccaactgctctgatgatccttactgttgcgggttctgcttatttattatggatgggaataaatttattactcacccctcctactccgaacgagtctggttctgaaaaggctcagtcatggttgagatgggctaccaaaggcgtttatgtgagtggattaaacccgaaagtttttttactttttttagctctgcttcctcagtttattgatactactgcttcatggtcagtgacaacgcaaattcttgcctttggtgttgtccacataattagctgcgcgataatttacttaatggtgggttatggttcagaagccattttgaaaaccagaccacaggcagcccaattagttggccgtttttcgggtggcttgatggttgttatcgcaacgtgcttattgattgggcaaatttaaaagtcatttaggaaaaagttactgactcacttttcgggtcggtaacttaaataataaatataagaaaaatttatctcattcgtttgaggttataggtcacgactccccaaatcaccagttcttgcccctcttcaatataaatattttgataatcagggttttctgctttcagccacactttaggggggtgaaattgggtatcaatcattaagcgcttaacagtgaaatcattgtcgataagtgcaatcactatatcgcccgatttagcgggaatactacggtccacaataagcggatcatcaatatcaattccggcatctaacatagacaacgaattggctttgacaataaaggtggcattttcatttctaattaaatattcatttaaatcgagtgcttgctcaatatcgtcttgcgctggtgatgggaaacccgcagcaacacgttctgtcgccaaaggaatgtggtaaattttatcgttgttcggatgaacctgctgtatctttagttttgaagtgaaatctgtctggttattggttttgacattattcagtaaccaatttttgataaagttgacttgagattcaggaacacgaatcactttggtgggttcattgaactgtgctttacggccggcgttttcccgtgcaccgccatgctcgaattctttcttctttggcatatcgcctccatttcaccgttcaaatcctacacaaacaatgtaacttgaaaaagttacattttcaagttgacgaaatattttttttgcataacaataaatttcatgatcagattttaatccattttgcttttaacagggatgttaaaacggaaatggtaatttgaagagaatcaaaacctattgtgaaatagttcttattactgactgttttgatttttatcaatgaaattctgaacacttaaatatgagttagattcagtttttggtatggagacatgcgaaatgaaaaatcaacgtgatgcagttttaggttatgcagatgaacaacatgcctactatatccgtcttattgaaaatgatgcggtattaggcgaaagctatggaattttctgtgaaaatccggaaagtgaagcagccgaaagtattatgacgacactatttttaaagaaatcattttggttaaatggctcagaattcacagatattgtaaaaggcttacatccccttacccactcataagtttaaaataataaaaataaaggaggcataatgcctcctttattctcaaaaactgtttgcttaagacgtaaagcgtccataagcatcgcgtttttgattacgagagttctgaccacgaccatctgaacggccacggcggtcatcatcgtcgtcatcgtcatcacgacggctgcgaccacggcctcggccacctgaacgaccacgatcatcatcttcatcgtcatcatcataacgactgcggccacggcctcgaccacctgaacgaccgcgatcatcatcttcatcgtcatcatcacgacggctgcggccacgacctcggccacctgaacggccacgttcatcatcttcatcgtcgtcatcataacgactgcggccacggcctcggccacctgaacgaccacgatcatcatcttcgtcatcatcgtcacgacggctgcggccacgacctcgaccgcctgaacggccacggtcatcatcttcatcgtcgtcatcataacggctgcgaccacgacctcggccacctgagcgaccgcgatcatcatcttcatcgtcgtcatcacgacggctgcgaccacggcctcggccacctgaacggccacgatcatcatcttcatcgtcgtcatcataacggctgcgaccacgacctcggccacctgaacggccacgatcatcatcttcatcgtcgtcatcacgacggctgcggccacgacctcgaccgcctgaacgaccgcgatcatcatcttcatcgtcgtcatcacggcggctgcgaccacgacctcggccacctgagcgaccgcgatcatcatcttcgtcgtcatcatcacgaccgcgaccacggccacgaccgcctgagcgaccgcgatcatcatcttcgtcgtcatcatcataacgactgcggccacggcctcgaccacttgaacggcctcggtcatcatcttcgtcgtcatcataacggctgcgaccacgaccattacgatcatcgtttttatgacttaaagcaccagcttcacgagcctcttctgaggtaaattcatgtgcgttaccactggcatgtgcagcacggccagcttcacgagcttcttctgaagtaaattcatgcgcattgccactggcatgtgcagctcgcccacctttactggctatttctctgactctttcaggatccatacttgcaaatccacgatttgaagtacctgaactattgttatcatcttcatatctagtattagccatagttatatcttcctatattaaaattataagtcgctaccgcttttattgaacggataaatttaagataagagatttaaaatatttttatacccatgctatgtttcaatctttttaaatgtatataatttaaatttcaaataaaaactccaacttcattatttaaataaatattttcttagttaaaatatttataaattattagctacttttactttttaaatactcaccatacttattattactcaaacctacataacaatatatttttacaaatacatttaaaaattcaggctaaataacacaaactttcataacatacaaatcaataaaaaacaaaaacatcttcactattgaagaaacaaacctaaaatataattaaaattatttaaaaacaataacataaaccattaattttgcataaaaactttacttgagtgattaaaatcaagatttaaaattaacatataatatttgtgagaaaagaatgatgcaacctactcatacacactcaacgctacaatatattcatatttctgtacctgaaattttactcagtaatattcaaataaaaaattcttggcaagattataaccaagaatggagctatagattagacccgcctcacgcaagccatccttttcagagagacttgtatattattaaatcaaaaaatattgaaacggaagatataaaaaaaatattagataatatagttgttaaaaacagtaaaaataaagatgacttaaaaaatatagtcgaagcggaaacagtaataaaagaaattttagatttatctaattatatacctatagaaaattggctaaatgatacaggtaatcgatcaattgttgaaagtatgattgataaaaacaaggttaaattattagatattatctaacctaacttgatatgttatatttttttacatccttatatataaaataacaaagacaactttttaaaaaagactatttactcatattcacgtgcaaattaaccaatatagagggactgaaaattaaatagaggtagtctagacatggaaaatacaacgaatcagtatccatcagaagttcctgcacaagttcaacctcatcaaccaggtgatcaggagaaaatgcatcctgaaccagaaattattaaagcatcccataaaggcagtgaaaaactaaaaggcaaagttgccgtcattagcggtggtgatagcggtataggccgttcagttgccgtactatttgcccgtgaaggtgccgatattgctgtactgtaccttaaagaagaccaagatgccgaaattactaaacagcttattgaaaaggaaggacaacaatgtcttttattaaaaggtgatatttccgatccagaccttgcaaaacaaaatattgataaggttttacagcattttggaaaaattaatattttagtgaataatgcgggtgtgcaatatcaacaaaaagaaattgaaagtattagtaatgaacaattagaaaaaacatttaaaacaaatatttttaccatgttttatttaaccaaagaagccattccttatatggaggaaggcgatagcattattaacaccaccagtattaccagttaccaaggtcatgatgagttgattgactatgcaagtactaaaggtgcaattacctcttttactcgtagtctatcgaacaatttaatgaagcagaaaaaaggtattcgtgtaaatggtgttgcaccaggcccaatctggactccccttattccaagtagtttcgatgccgagactgtcgaaaagtttggtaaagataccccaatgggtagaatgggtcagccaagtgaagtcgcccctgcttatcttttccttgcctcagatgatgcaagttatattactggtcaggttattcatgtaaatggtggtcaaattgttaatggctaataacataatttagaaaaagccctgaaagcgtttaaactttcagggcttttttttatttaagccggtacatgtgcggctatttgttctcgtgaccaaacacggtgtgctttaatcaggttcttaaatttttccgcaacatgctggaactcatcttcaattaaagttccttcatctgccactaaacctaatggttcaagcaaatcagatttattacccaaaaatacgattggctttaagtgcttataagcttcgagtaagtaatggcgagctaccccgtcttgcataaccgtatttaggttatcgccatccggaataattaccgcatcataggcaattgaaggctcagacatttgcatgccatcagccacaataacgttatctttatgatctttgactggagccaagctcggcgctagtaagtgaaggattacgccttctttaattgcccagtttttaatagcttctaatgcgtcagacttcaccatgttatggataagtacggcaacttttctaccttgaatatcttcaggtgggaaagctaaaaaagataacttggcagatttttcaactgctgttttcttataacttagggttaagtcaggcacttcaatacctaaatttgcccctacttggcgtgccaaatctaagtcgatattagccaaaatttgttgaacttgacgctcacgaatatgctttctttgaactttacttaattcaaaagtataggcatcgaccacatgtttttgttcatgcggtgcaaggcttttgtaataaagtcgtggttgagagaaataatcagagaacgtctcacttctttgacgaagtttatgcccactaattttttcaggataactttcaaaaccaccatttgatgccgctggcggtgtctctactggccaatttccatcaattgagtttggttgatatgcagcctgtcctttatgaatggtatgctgatgaataccatcacgttgattgttatggaatggacacacaggtttgttaatcggaatttggtgaaagtttggtccacctaaacggcttaactgggtatctgtgtatgaaaatagacgggcttgtaaaagtgggtcatcagtaaaatcaataccaggtactacatgacccggacagaaagctacctgctctgtttcagcaaagaagttatctacatttctatttaaaacaaatcggccaattggcgtaacaggaactaattcttcaggaataatttttgttgggtccagcaaatcgaagtcaaagttcatttcatcttcttcttcgacaatctgcacgccgagttcccattctggataaaaaccgtgctcaattgcttcataaagatcacgacggtggaaatccgggtctttacctgcaagtttttgagcttcatcccataccagcgcacttaaaccttgttttggtgtccagtgaaatttcacaaaatgtgatttaccttcagcattaattaaacggaacgtatgaacaccaaacccttggatcgaacgtaagttacgaggaatcgcacggtctgacattgcccaaattacagcatgtgctgactcgggcactaaagacacaaaatcccagaaagtatcatgcgcagttgcacccgttggaatttctgtgtccggttcaggttttaccgcatgtacaaagtctggaaatttaatcccgtcttgcacaaaaaagacaggtgcgttatttcctaccaagtcgaagttaccttcttgggtataaaacttaatggcaaaaccgcgaatatcacggacagtatcggctgaaccacgaggcccttggactgttgaaaaacgtacaaaaataggcgtctgaatagttgggtctgtcaagaatccagctttggttaaacgttcgtttccttcatatgcctgaaaataaccatgtgcccctacaccacgcgcatgcacaatacgctcaggtatacgctcatggtcaaagtgggtgattttttctcttaaaatgaaatcttccaataaagtcgagccacgaatacccgctcttaagctattttggttatccgctattttaaccccctgatttgtggttaaagcttcattagttgcatcatctctaactgtgtctaactgttcagttttctgggtagtattggctttatttgctgcatcggcaccagccatttcacttgttttattggttgatttagtattgtcgttcatgtccattacctatgtttttgaaagttaaacttggggttgaagtagaaaacgtttataaaactagtttttaaacgtacctaaataaggaaaaaggagttctacgtatttacgagtactccaaagaccaatacttttatgatgagaatctggggcaagaaacggagtaagtttgcaaatctttatggcaaggtcacttgattgttggacgcgctcttgtagtgcatcaagttcgccatccgagatataactaaatagatagtcctgaatacgctggctattctttagttctctgctgtatgccaagaagctagaagaatgatcactaccagcaatccagtcatgaataatttggcgctctacagggttaaacaccccaaacatttttccattttcttcattaatcattcgccagaatacgctctgttcagggtcggtattaaacttaatccatttgtgttcagttaaatgagtgattaaacctgcaatgtcatcgggatttgataaccattgattaatggtcttgcacccaaactgtctggtttcgttatggattaactgaccgacaagcgcctttcttttgaaaattctatggacaaagtcttcagtatttaaattttttataatgtttgaagaggacaccccatgattattaagggcaaaaccacgttttagcttggtcaagaagagttctttatctctatattgattataaatatcttcaataactttaatggctttataggcatgaccattgtcaatattgtcgatagtgatatgaagattaaagtatttagaatcaatacctagttcagcaagctcataattcgaaattaaaagatgcagtggtaactgctcatagcctaaattaaaacccacaatctctggaataaactcaggaggcgcataacccagagcaagctgcacaactgcttgatgataatactcgtcttctaaaagcagatcgaaactgtctagccctagactgcgtaaaaggtcatcatagatacagacatggtttgcttttggctcacctaacccaagctcttcgagataagtaataattaattcatgaaaaataggatcattccaataatgcactgagctatatagccatgcaccgtctacttttttggttggagatacctttattaaaaactcaaatgcctgagcgacgttcttaaaatactctctatcttgaccagattgtctacgatttaaatatgcctgaaattcctgacaattttttttattatcgttttcacaccatgccttaatcaaattgatatccgaaggaaaatctatttccttcatctctagtttatctatctctttaacaagaaaatctctagcctttttctctttctcaaagctagaaacatcaggatcaaggaaaaaaacaaacaattcataataattttgttgattatcttgtaataagtctaataatcgttttttcactacaacaggcattttcattctccgtttgtgagatatcaattaccatacgtcaccctaactataatcgagttttaagtttgttattttgcgttattaaaaaacagggtaaatacaataaatctaaaaaattcatagacatataaaataacgcaaaattacatttaaacttttagtattatttaagctgctgtttttatataaaatttgcaaatcttaatccaattttacattaacttcaccatcaaaattataaacattaaaaaaataacaaagcaaacaattaaatagttttataacattttaaaaacaattgtagggagaattaaaatgttcaataaatgttgcgaattattagcaaaggaaaaaattaaaattgcattttttgaaagtgcctctgcgggctaccttgcttatcgtttctctttaagtccttattcaggcgatattctgattggaagccttgtgagttacgaccttcgcgtaaaggaaaataccttgcatatttcagaagagcttattgaaaaatatactgcagaatcaatgcaagtaactgttgaaatgattaataaaggtaaagaacttttacatgctgacctgtatgttgcctgcacaggtcttttgaaaaaaggcggctctgaaacaccagaaaaacctgtaggtactttcttttactcaatatattataaaaataatttttataattttagacgtgttttaaggggtcctgcctttttaaaactaagaaagttgatttactatgttactcaagatataaaacttattatattagaagacaaaaggcgttaattttatataaaagttaacaaatatacatttagaaatatttattatctttcttaaatattatgtgctgaaatgtaattttttaaatgttcatattaataatgtttatgacttaaaattacatacattaaaaatcagcaagttatttaaaatttataaattttaagtttacagttaaatatagggtaacacccctaccctacacatttaaaatctacatgttttaataaccctatctgaagctctcagataaaacacatcgtcataattgatatgaggtattaaaaatgagcactactaataatcaagcaaatcaacgcaataatcagcagcaacaacaacagcaaaatgacaaccgtaatcaacagcaacacggtaaccaacagcaaaacgatcaacagcaacaaaataaccagcaacaacagcaaaatgataaccgcggccaacaacaaggatctaaccaaaaagattctggccaacaaaactcaaataacaaccaacaacgttaatcgtttgtagttgttctttgatgcggtcgatcatttaggaaggtgacctcaccttcctaaatcaaaatataagcataaaattcaataaaatatgagggaattctgatgacagatcaaaatacagatcatgctcaattggtagctggcgatcataactattctgactctcgctggcgcgaaagctatcttactcgaccttattatcaagaagcgcaattaactacaccagatctagattatgatcgtgatttttctgcagcttatgaacttggtcatcgagctcgttctgaatctaaagaaggaactcagtttgaagatatggaaggcagcttgcagcaaaaatgggaagagctaaaagctgagtcccgcctaaaatgggaacacgctaaacaagcgattaaagatgcgtgggatgatatttaacatcctcaaaaggtccatagctataagcttatttcctattggccctgggaaataggcttttttattgtcctaaaattatgagcattaaaaaaatggtggcatattaaaattatgactaagatattgatttgctaaatttggatcatcaaaaacttcttttttaaattgtacgctcggtgttgtagcgagtacatgtgtcggcttaatagtaacttccactacatacttattttgctcatacttggcttttacgccataaatctcagaatcattaatgcaagttccatctgtaaaatatacaaacatacgtactaccttaaatattactcatcatagcggtcttattaaaaataaagcctgactcagataatcaggtcaggcctttcatcaaaattaactttgatttttcttaaaatattcaattatttcttccccattatttacaggctttttctgcgaagggtaagtttcttcataggcataggcgggtaaagtaattttagctcgaattggaggtaatttttcttgtccacctgtggtaattcgctcaataaaaccagcaagccaaagtacaaactcctgagtatttttacttttaggaataagacttaaatccaatttaatttttgactcttgcaaaggtttaatgagtatttcggcaaaatcaatataattatataaaagctttaattttgtcccctttatttcttgtctgagttcaatcatcaaattattaagatcttccatcggatcatccgtaaagccttttttttctttaacattttgatatattttctcagctatttttaaatattggggcatatccttaccttttatagttcgctcttactaaaatgaattttggatgaatataagtaagctattgtgtttgttttattaactttttgaaacggtaacttaagattgcaacaaaacggtaacaacaaattctccaaattgtaaaaacaaaataaatatttgattaattttatatttttatatatttcattattattaaattatattttttatataaaataacgattaaaaaagcctactaataaagtaggcttttgaaagaagctaatctattacgagtttttattcatgtcatgagatgtagctggatcacttgcttcatgcatgccgtcatttcttgaattacgatcttggcaagcactcatacccatagcaattgccaacaccatacttactgcacaaaagattcttaccatttaaatcacctttataaatattaaaatgtaggtttatgaataacattatcttatgttggcctaccgcagtggttctcttaacttttgtagattatgcaagcttttgtaaaaaccaaaaattatgattaataaaattatatttcttgcaattgatattttggttattttttggcaagcagtgtttaggaggctcaggtcatgttataaaaatcgaattattaaatagtttagccaaacaacacacctaattagagatattgatatactatacaaataaacaattaataaatatttgatatataagattaaaaaataatagtgtgacttatattcaaattatttatattcatattatattttttaatttttctattttctaaataaaaacagtgaaatatttatatcaagttatataaatcaatcttttatttttgcaattgacccaccccaatgctcagcttatgatgctcgcgctgaccaattttgtcagtcggttttagcagaccgtctacctaagtgcactaaaaacacgttttttggtgtgacgcccctcgtgcctttgatggaggaacgggagtgggacacccttgggtgtgctggtttcttaggtatcagtctgctaaccctctttcgtttcgccaccataataatgagcaatgagtgggcataacttcttttaaccaaggagtcactcatgactattattctatattttttaaattcttttattaaacctacttacattcaacctcttttactcaagcagtcatttcttagagttctttctcatcctctgtttaaaagaactacacactatagagttcgaaaaatttttacttaatctttttgtgtacccatcttgatatacaagattgggggcagaagttttatgtattcaaaatcacataaagattaaaacttctatcaacatcacttaacgataacaacaacccatgaagagtaacaagaatgttttttctctatcgttttgttttggtgagccttctgacaataggtgttttaaatttgatggggtgcaggccaatgagtaaaaatgaatttaatacgcgttgtgtatgggccggacatgacctttcagcgtgtaattgtatttataattctttagagcagcattattcacctcaatttgtagaaagtttaccaaaattaagtttgcaaaatattgatgcaaaaatgaactttgtagaaaccatgaatcaaacgatgcagcagtgccaattgagtgcgagcaaacactaaactaatttatagaggcatgctctaccaaaaaatccaagaatgtacgtacgcgattaggaacatacttatcgtggccaatccagacagcatgaaattcttcagaagcatgaatattccaatcttcaagaattttgacgagttgtttttgctgtaacgcatttcgaatctggaattcatttagttgagcaataccggcacctgccagtgctaactgtaaaattgcttcgccatggtttacttttaaaactttagagggggttaggctgatttcctgagttgcttttttaaataaccaggttttgttctggcgctgataacttacatctaaaagctgatgttcatgtagttcatctggatgctcaggacaaccgtacttttcaatatatagaggagagcaaacatactgtttataagtactgccaagcgagcgggccaccagattggagcttttcaaaggtcctgttcgaatcgcaacatcaattctttgttcaaccaaattaattacttcatcactcaaatgagcttctaattcaatttccgggtaacgttgattaaacaaactaatgcatggcaataaaaagtgtatccaatatgaaaaactggtatggattctaattcgccctttcggtatatgatttgcggtaaccgattgttccagttcgtccaagtcattgagtatttgaatgccttgctcataaaactggcatccttcactggtaagctgaaactgacgtgttgaacgattgagtagcctgacacccaatcttttttctaaacgagaaattaacttgcttacggcagacggcgtcatgttacatgctcttgctaccgctgaaaaacttccaagctcgaccactcttataaaaattgccaactcgccagaacgattgatatcaaaataagacatagcaaaatttatttatgaattgtattcacaaatcttattccgcttagaccgctataacaaggcatcaatttgtttcaacatacctttaattcgttttaaagagttcttgagatgaaactttatcaagctaccctattttcttttgttttaattacgagctttgcacaagctgatgtagaaaacagccaatggattaccacttggtctgcgagccctcaaaaagtctggaataaagacttcgtttttccaacactcattccagagcaagtatctaatcagactattagacaaatgagtaaaattagtttgggcggtgaagcggttcggctcgtttttaccaatcaatatggtaaacagccactttatattgatgaaacaacgattggtttagcgaacgcagcaactctaaaatctaagagcatctatcccgtttatttttctggtcaacttaaagcaagaattttacccggcaaacaactcataagtgatccaattcagttgcctgtacccgatcatactcaattggtggtgaatagctttattcaaaagcctacaacgtttaaaacatttcattgggatgccaaacaaaccagttggctgattagaggaaatcagacaacaaatttaactacaccaatcgatgccaaaacaacgacggcacggttattactgtctgcaatagaggtaaaacccaaacaaaaggctcatgtagttgcagttgttggagactcaattaccgatggggcgactgcaaccttagatgcaaatacaagatggaccgattttttagcgaaacgtttatctgtacatcgtatggccgtagttaataatggcatttcaggaaatcgattacttaccgatggtatgggtgatagcgttttaaaacgtttaaacagtgagatatttcaatattcaggcgttaaaactttaattgttttggttggtatcaatgacatttcatggcccggtacagcttttgcacctaaacagcaaataccctcttttgaggcgctcactcaaggttatcgacgtgttgtaagtgaggcccataaacataatattcaggtgattggtacaaccttacttccgttctctggtgctttgcctaatacccctttagataattattatcaacccaacaaagatcaattacgtcagcgcattaaccactggataagaactagccatacctttgatggtgtgcttgatcttgatgaaggcttaaaagatccaaaacatcccaatcgattaaatccaatttatgattctggagatcatttacatcctaatgatcgcggcaatcagcatatggcagaattggtagatttagatcaaattattaaaaattaatcattcccccatcaggtgaaatcttcacatgatggggctgcttatttaaaaatcataactcgctatcatgttgaagcggttatcaatcccgttacgattatcaaatgtttctcgttccccataaacatattcgatacccaaagtaatcggcttatacgggttataaagtgcattcacccaaccttgccaaagctgtttgttttgggtggtactagtacgctgtaattcggcaaaacggttatcatctttagccttcatatagccatagcctaaagtcgagcgaatttgcggtgtaaattgatgagtgatacccaaagaaaccgtgtcaaattcattgctatgcatattattttgatcatctattgcatagccactgttactccatagcaagaaacgtccatcacccttaacatggtaataatcggctttaagtaatgtatcaggggtaatttgatatttaccgcccaagcctaccccccacgcccactcgctatcattgttagttcttttttctgcaacaaaactacggcctgaaagcattgaaccattggcaaatttatgatttaaacgccccactaaagcgggtaaacgcattttattatctggatctgttgccgcagtatatttcgggtcttcaactgatactgcaaaacttgtatttgccgttaagttatcgctatagcgaacaagcggtgatcttaataatgcactacctacaaatgtacctgcatcaatcgtttctgggtaatattcaggggcaataaatgtcgaccatgtttgaccaataagccatttatcaaaagttaaataggcatgacgtatccgaaactgatcacgtgtagccgccccaaaaaagtccatttctaactttccgcctacgtcaccaacggctgtaggggttttaaaattcaatccaaagcgtgtcacatacacagtactgtgcaactggtctttctgggcagattcttctggcgtattttcaagaggaacgccgctaatattgttatacatgctagatgcacccttaatttgataagaagcatctgctcgtatataaccgtataagttaaattccgcaccagatttagttaatgtttgctgtataggtggtggagcttgagtaactacaggagcagcttgttctactcttctttgagctaaagatttttgagcctccatattaatttgtagcatagctcgtagttcttttatttcttggcgaagttgctctatttctgggtttacttggcctgcaaaagcagaagacataagcagagtcacagaaactgccaacaagcttttttgaaccgttgtatttaaaattttcatcatgaaattttcctttagacctttaagtagtcttaaaagtctcgacatcctttttgttatgtacctatctaaaatagatccttgaaaatttgcctttctttcacaagaaagacgttccctcatattttttagatccaccctccctagtgcagcaaaagcaactttttaattttccattttttatattctcttccagattgagaatattcggttttaaacccttatttatattccccaatagtattatttttttgcaataatcccttgataagtcaaaatttgcgtatatggctgtacgctttcaaagcctgtctcttccaaaagttttatatatccttcagtcgttaaactaaaaaagtcctccgccatacgctccaacattttttgacattgttcttctgttaacccttgagccaaacacaaataatgtaatgcttgaagctgctgtggatttacacaagtcatgaggtcataggtaagtaaaggcgccttttcttttaagcgcttataaatatccttaaagaaggctggttttatgtcatctgcaataaaatgagccacgagaatagaaagtgcagcatcaaagcaactctcgagaggtaaagctgaagtttcaccgtgaacaaaagtgacttgggtagatttacctaaaatctccacctgctcctgagctttttgcagcatggttaaagatggatcaaccgctgtaaattgccagtttggatgtcttttaagtaaataatcgagttcgtaacccgtaccacagcccacaattaagatatgagcatctggtggcaacaccgactgcaaaatggcatccacctgttggtggatcacttcatagcccggaattaatttacgaatatgcacatcatatccttcgactactttagggctattaaagtcttttgccattttgcgtgtcctctattgaaaccgtatttcgattttcctttgctgcactttgaccgagcttttgacttatttagtcaaagacatttcccgttaaattaagttcagctcgcataatttcctgcaatttaaacttttgggctttgccagaagcagtcattggaaactcattaaagaatcggacataacgcggcactttgttgtgtgaaatgtgttctttgcaaaattggcggatgctgtcttcatcgacttggtgatgctcatgcagaataatgcatgcacaaagttcttcaccatatttcgcatctggcaagccaatcacctgtacatcgcttacgtctggatgagtatataaaaagtcttcaatctcttttggaaagaggttttccccaccacggatcacgacatctttaatacggcctttaattttaataaaaccgtcttgatccatctcggcaatgtcacccgtatgcatccagccagccgcgtcaatcacttcacgggtcttttcctcttcaccccaataaccagccatcactgaataaccacggacgcatagctcccctaaagtcccttgcggaacaatttgcccttctagatcaacaattttaatttcaacatgcggatgaacatgcccaactgtgcttactcgcttatcaatcgaatcgtttaccgagctttgtacactcactggcgaggtttcggtcatgccataacaaatggtgatttcagacatatgcattcggtctataacacgttgcataatttcacgtggacaaggactacctgccataatgcctgttcttaagctcgacagatcaaaatcattaaactgttcatgctctaaggttgcaataaacatggttggtacgccataagctgccgtacaacgttcttgatgaatcgcttttaaagtttccaaaggattaaatacagccgatggatagaccatggttgccccatgcgtcacacacgccagattccccatcaccatgccaaaacaatggaacaatggcacagaaatacagactttatcttggggggttaaacgaatgccttcaccgacaaaataaccattatttaaaatattatgatgggttaacatggtccctttcgggttacctgttgtacctgaggtaaattggatattaatagtttcatcaaactggagctgtctggctaattgttttaattgttctagctgttcagaagttggtgtagttagtaaatcactaaaacgataaataccggtatgttgttgatcatcaattttaatgacaaattttaaatgtggcagtcgttctgaactgagcactttatctgtacaggtggttaactcaggagcaatttttgtgagtaattcttgataatccgtcgttttaaattgagaagcaataatcaatcctttgcatgagaccttattcaacacatattcaagctcatgacttttataagctgtatttagattgactaaaataatccctgctttaaaagctgcaaactgcgtgatggtccattccacacagttaggtgaccaaatcgctaatcggtctcctttttttaatcccaattttaataggctacaagcaaaagcgtttacttcatcctgtaaagctttataggttaatcgtctgttttgatgaaaactgacaatcgcttccttttcagcatattgctgacaggcctgatcaaattgttcaccaatggtcatacccaataagggttgtgtacttggtcccgaggcgtagcttaaccgttcttgttgcattgaatcattctccttgattctttgtaattctcttcttacctgatctaattgttgttactgcaactacttttccaaactacttattttgtgttgttttatcctttatatgccctattttttctgcacagcatccacacaaaagtcagcaatctgttttgaaaaatagtctttatgcgcatgatcaaactttgtattttgagctgggtctaggggttcaaccaccacataagtcatagcaccgactacacaaagtgctgctgtgtttaaatcatccaagataaactcaccacttgcatttccatccgcaagtatttttttaatactttgtttaatcaattgcttcacacgaaaacgctcatgttcaaccgttgaatcgacgggttcaaacatgagtgaatatgcaagctgaggactattcagtgcccgtttcacaaaggttgccaccgccttgtgtaatttctgctttgccgataagtcactttcggtaatcgattcaatcaccaatagttctgtattaatggcatcagacaaaacttctattagcacttggcttttattatcgaagtagcgataaaccagtccactagatacacccgcttgctctgcaattgtttgtatttgtgcgtctttgaaccctccctctgaaattatttttctggctgaactcaaaatcgattttcgattttgctccatccgctcttgcattaaagatgatcgtttatagctcataatttattctctaacaaataaaatgaattgtaaatcattttatgaatctgtattcactttttcaaaaaatcattgtatggtaattatcaaatacccacaaaatattttatggacaacaaatataaccaataggatgaaaatatcatgaacctacgcagcttgaatttcggtctagatgaaactttaattgcgcttcaagattcggtagccgcattttgtgcaaaggaaattgcaccaattgcccaacaagttgatcaagacaacaaattccctgcacatctctggaaaaaattcggagatatgggccttttaggtatgacggtttctgaagaatatggcggtgccaatatgggttatttagctcatattattgccatgcaagaaatttcccgtgcttcggcagccattggcctttcttatggtgctcattctaatttatgtgtaaaccaaattaaccgtaacggtaacgagcagcaaaaacaaaagtatttaccaaaattaatttccggtgaatatgttggtgcccttgccatgtctgagccaaatgccggttccgatgtcgtcagcatgaaattacgcgccgagcaaaaaggtgatcactttgttttaaacggttcaaaaatgtggattaccaacggcggcgatgcagatgtgctggtcgtttacgctaaaactgatccacaagctggcccgaaaggcatgaccgcattcttgattgaaaaaggcatgaaaggctttagtcacggcaaccacttagacaaactcggtatgcgcggctctaacacttaccccctattctttgacaatgtagaagtccctgctgaaaacgtacttggtggtgtgggtaacggggttaaagtactcatgagtggtttggactatgaacgagcagttttaagtgccggacctttaggcattatggatgcttgtttagatgtcgttattccttacttacatcaacgtgaacagtttggtcaggctttaggtgaattccagcttatgcaaggcaaacttgccgatatgtattcaacatggttggcatgtaaagctctcgtttatgctgttggtgctgcatgtgacaaagcggatcatgaccgcagcctacgcaaagatgccgcaagtgccattttatatgctgctgaaaaagcaacatggatggcgggtgaagcaattcaaactttaggtggcaacggttatatcaatgaattccctgctggccgtttatggcgtgatgcaaaactttatgaaattggtgcgggaacttctgaaattcgccgtatgttgattggccgcgaactcttcaatgaaaccaaataataattataaataaggacgtatcttatgaaccaattacaaagcaagattaatgttcgaagcgaagacttcaaaacaaaccagcaagctatgcaaacattggtcacagatctcaaacaagttgcccagcgtattgctttaggcggtggtgaaaatgcccgtcaaaaacatttggctcgaggtaagcttttaccccgtgaacgtattgatcaactgattgatgtcggcacggcatttttagaaattggtcagttggcagcgtacaacgtttatgaagatgatgttcctgccgcgggtgtgattgctggtattggtcaggtcaacggcatcacttgcatgattgttgccaacgatgcaacggttaaaggtggaacgtattatcccctaacggttaaaaagcatttacgcgcacaagaaattgccgaacaaaatcatttgccttgtatttatttagtggattcaggcggtgcctatttaccaatgcaagatgaggttttcccagaccgcgatcacttcgggcgtattttctataatcaggcacgcatgtcgagcctaggtattgctcaaattgccgtggtaatgggtagctgtaccgcaggtggtgcttatgtaccagcgatgtctgatgaaaccattattgtacgtaatcaaggtacgattttcttaggtggacctcctttggtaaaagctgcaactggcgaagtggtgagcagtgaagatttaggtggtggtgatgttcacacacgtctttcaggtgtggctgaccatttagctgaaaatgatgaacatgcaattgcgattgcgcgaaacattgttgccaacttaaataaaaagccaaatgagttaaataagcaaattgatgaaccattatttgatgcatcggaactctatggcgtggtgccaagtgatgcgcgtaaacctttcgatgtgcgtgaagtcattgcacgtattgtagacggctctcgttttgacgagtttaaagcccgctttggctcaacacttgtaacgggtttcgcttctctctacggcatgccagtcggcattattgccaataacggaattttattttccgagtctgctcaaaaaggcgcgcactttattgagctatgcacacagcgcaatattccattgttatttatacaaaacatcaccggctttatggttggtcgccagtatgaaaatgaagggattgccaaacacggcgctaaactggtgatggcagttgccactgcaaatgtacctaaactcaccctgattattggtggttcatttggtgcaggtaactacggtatgtgtggccgtgcttattcaccacgctttttatggacatggccgaactctcgtatttcagtgatgggcggcgaacaagcagcgagcgtactttcgactttaaaacgagatcaaattgagcaaaaaggtgcccagtggtcagcgcaagaagaagacgaatttaaacaaccaattcgtgaacaatacgagcgtcaaggccatccatactatgcttctgcccgcctttgggacgacggtgtaattgatccagctcaaactcgtcaggtacttggtttaagccttgctgcggccatgaacgccccaatccagccaaccaaatttggcgtgttccgcatgtaagaggtgtatatgagctatcaatttttacaactcgaacaacaaggtcaggttgcctatgtttggctgaaccgccctgaattgcacaatgcttttaatacgacagtcattgaagaactacatgcttgctttaagcaaattaatacacgtgatgacattcgtgttgtggttttagctggtcgcggtaaaagcttttcggcaggtgccgacctcaactggatgaaacaggcaggtcaggcatcttcagcagaaaatgaagcagatgcattaaaacttgcgcaaatgcttgatgcacttgcaacacttaaacaaccgactattgcccgcgtgcatggcattgcctttggcggcggtatgggcttagcgtcggcatgtgatatttgcatttccagcacggatgccaagtttgcaacctctgaagttcgtttaggtcttgctccatctaccattagtccttatgtgattcgtgcgattggtgcaagacaagcctctcgttacttcttaactgccgagcggatttcagctcgtgaagccaaacaaattggtttagcacacgaagtagcagatgctgaagacttagataaaaaagttcaagaaattgttgatgctctattactcggtggcccgcacgctcaagcggcttcaaaacaactcattcaaatggtgagcaaccagaccatgagcaatgacttgctgcaacagacagcacatcatattgctcaagttcgtcaaggcagtgaggcaaaagaaggtctaagtgcctttttaaataaacaacagcctgcttgggtttctaactcgaataacaacaattaaggacgatcatcatgtttgaaaagattttaattgcgaaccgtggcgagattgcctgccgcgtaattcgtacagctaaaaaattaggtattagaacggttgccgtttactcagatgcagacgcaaatgcacaacacgtcaaacttgcagatgaagcggtttatattggtcagtcccctgcaacacaaagttatttacaggttgatcgtattattcaagctgccattgatacaggcagccaagcggttcatccgggttacggcttcctttctgaaaatgatcagtttgcactcgcttgccaacaacacaacatttgctttattggcccgccagtggatgccattttagcgatgggcttaaaagcgacctcgaaagctttaatggaaaaagcaggtgtccctttaacaccgggctatcacggaaccaaccaagatgctgactttttaaagcaacaggcagaccgaattggctatcctgttttaattaaagccagtgctggcggcggtggtaaaggcatgagtctggttgaacgcagtgaagattttctgcatgctttagcctcttgtaaacgtgaagccaaatccagctttggtaatgatgatgtcttgattgagcgttatgtgattcaaccgcgccatattgaagtgcaagtgtttggcgatacacatggcaactatgtacatttgtttgaacgcgactgttctgtacaacgccgtcaccaaaaagtgttagaagaagcccctgctccacaaatgccaagcgagaagctcgatgcaatgcgccaagcggcaattgatgctgcacgcgcggtaaattatgtgggcgcaggtacggttgagtttattgtagaacaagacggtacggcgtatttcatggaaatgaatacccgtctgcaagtcgagcaccctgttactgaaatgattacaggtgaagacttggtcgagtggcaacttcgcgtcgcttatggcgaacctttacctaaactacaaaacgaattaaaaattcatggacacgcgcttgaagcacgtatttacgccgaagaaccagaaaaaggctttttacccgcaattggtaaaattgactatctgcactacccaacccaaaaccaatatgtgcgtgtagatagcggtattgttgaaggcgatgaaatcacgacctattacgaccctatgattgccaaattgattgtatggggtaaaaaccgtgaagctgcgcttattcaaatgcaaaatgctttaagtcaattccatgtcgatggtttaggcaacaatattgcctttctggaaaagattgttcgtagcgaatcgtttaaacaagccaagcttgataccaacctgattcaacgtgaacaaaacttcttgtttagccctgaagagatcaaaccggaactggtggtagcagcagcatttattgagtttttaagcaagcttaataacaacagttcaagccaaaaacagctttggcaggctcaaccgctttggcgtttaaatattgcctatcagcacagtattaaactgaactatttaaaccaaaatattcaaattaaatttgcctcaaatgaagatggcttcaccgcagaatataatgggcaaagctacccaatttcaggtcaattgcttgatgcacatactgcctctgttcaaattggtgaggctcagcaaaagctaccttttaaccaaagtcagcaaggccttaccttgttccaaaatggtcaaagctataagtttgcttatatccgccaagactttaatcaggcagatagccaagccgatgaaggtcatttaaaagccccaatgccgggtgtggtcactcaagtgctagtcagtgcaaatcatagcgtgaagaaagacgatattttaatgacgcttgaagccatgaaaatggaatataccatccgcgcccctaaagatggcgtgattgtagactcctatttccaagtcggtgatcaggtcaaagctggcgatgagcttgtggaatttcagcctgctcaggaggaagttgcatgagtgagtttgtcaaaatcgtggaggtcggtcccagagacggcctccaaaatgaaaagcaggctttaactgtcgaacaacgcttaaactttattaacgatctaatcagtgcgggcctaaaatccattgaagtcggttcatgcgtttcggcaaaatgggtaccgcaaatggcccaaagtgacgagctatttaagttattaccccaaacaaccgatgtgcaatttagcctgctcacccccaatatcaaaggttttgaaactgctcaagcggtaggatgcaaagaggttgcggtgtttaccgcagcttctgaaagttttacccgtaaaaatatcaactgttcaatcgacgaaagctttgaaaagtttagcgatgtcatgaacgcagcaaaagcacataacatccgtgtacgcggttatgtctcttgtattgtcgattgtccctatgaaggcgcaattgcacctgagcaagtggtgaaagtggttaaacggctctatgacatgggctgctatgaagtgtctttaggtgaaaccattggcaccgcaacaccagatcgtgttcaaaaggtatggcaagcctgccttgctgaactcgacagcaaggtattagctgggcatttccacaacacctatggcatggcaattgccaatatttatcagtctttacagcaaggtattcgtgtttttgattcgtctcttgcaggacttggaggttgcccttatgccaaaggcgcctctggcaatgtatcaaccgaagatttgttttatttgctgtcacacatgggttttgaaactggcattaatttagagaagctgatgcaagccagccaaaatattagcaatgtattaaaccgaaaaagcttgtcgaattatgcaaatgcgtattggcaaaccaagtgtgcatagtcataaattaaaatagttcagcatctggtataaagctaaatattaggccaagtaccagatcatcctatctcatctttatctcattctgttcaggaattgggattcaatccctcatgcaatttttttagaatctattatttatttctgtattaaatgcctctttaaaaagaagcattttctaccctatttttattctaatccgtattattcttcatcctttttcaattgtaatccttaaaaaatttatctccttatttataaaaataagatgcatccatttcaatttttggagaaatatattcttctacccaatccaaccatgcgcgtgttttggcatcaataaaatggcgtgaaggcaataaggtataaaccccaatatcaggcgaacgccactcaggcaagatatgacataatcttccattttgaaccgcgtctaaagccgaaaacattggcaataacgcgacccccatatcttgttgcaccacatctaacaataactcagggttatctgcaatgagttgccccccaatgtcgatttgataagattcaccattggcatttaacaaatgccaatctggtgtaatagacgggtttaccaagcgtaaacaggcatgattttttaagtcttctggagacttaggaacaccatgtttttctagatacgcaggtgaagcacataaaacagaaaaaatagtgccaattctgcgtgcaacaaaacgagagtctgttaatgattcagtgagataaagactgacatccaccccttttgctaacaggtctggaacgtattgtgaggtcgtatattccacggttaattcgggataatgcttacaaaactcggccatgacagggaaaacataatgatgcccaaagcttcccatacttaatacacgtaaacgacctttaggtttagaggccgttccggtgacttctgcctctgcttcatccaccattgaaataacttgccgacaacgctctgcataagttgcaccaatatcagtcagtgcctgctggcgcgttgagcgttgtattaattttgtacctaagcgtgtttctagctcgctgataagacgtgaaacctgtgctgtggtcagatccatctgctcagctgctgctgtgaaactcccgctatcaatcactttcaggaatgcatgcattgcatgcaaaagtccaccatcgagatttttgcgcataacgtaaatatcttttcctaaattacggattgttgcaccagtttagatcaaccacaatgactaaatgtacatacattggcactaattcttttttaagaagaggaaccgatcttttttatttcgtatgtcacttgctccaaatattcaactggatgttgaaaaaagaaagtagtccgagctactaaaaattctaaggagatataaatgaatatagctacaaaagtcactccaaatattattgcaacaaaggatgtgtcacttgaagataaatatgtaagtgataacggtacagcatttatgaccggcattcaggcacttgttcgcttgcctcttgcccaaactcgccgtgacgcgatcaatggttatcatactgctggttttatttctggttatcgtggttcccctattggtaactatgataatttcctttggcaagttgaaggattacttaaatcccataatgtcgtatttcaacctggtgtaaacgaagacttggctgctaccgcaatctggggtacacaacaagcaaatctttcaggtcaaggcaaatatgatggagtgtcttcatggtggtatggtaaaggcccgggtgttgaccgttcaggcgatgtactccgccatgctaacttagctggtacctctgaacgtggtggtgtcgttgctttattcggtgatgaccactcatgtaaatcttctacagttccccaccagtctgaacatgtcatgattggttgtggtattccaattttctacccaacatccgttcaacaaattttagactttggtgttcacgccatcgcagtttcacgtttttctggtctttggacttccatgaagctagtcagtgaaattgtagaaacttccgcttcagttcatgtcgacttagaccgtgtcactcctgttataccagaagatgttaatttcccagagggtggcgttaacattcgttggccagatcatggcatccaacaagaagaacgtctttataaatatcgcttaccagctgttttggcctatgctcgtgcgaataaaatcaataccgtaacatggccttgtgaaaatgcccgtattggtattgctgcaagtggtaaaggttatttagataccattgaagccctacgtattttaggaattgaagatgaaacagcccaacagcttgggctacgtgtttatcaagttggtctaatctggcctttagaaccacaaggtattcgtgaattcgccaaaggtttagaagagttgatcgttattgaagaaaaacgtccaattcttgaaacacaaattaaagatgagctttactcacttcctgatgaccaacgtcctcgtgtcattggtaaagcaactgacggcaaaggtgaatggagtacctctattgaagaagcaccactcattggtcactatgagtaccagcctgaaccgattgcaaaaatgctggctgctcgcttcttaaaactagatattccagaaagcttaaaattacaaattcaaggcagaatcgacttactgctaaaagcagagcaagaatcaaaacgtgttattgaccttgctgaacgtaaaccttatttctgcagtggttgcccacataactcatcaacagtcgttcctgaaggtagccgtgcattaggtggtattggttgccactatattgccgtttcgcttgaccgtggcacggaaacattctctcaaatgggtggtgaaggtgtaagctgggtcggtgcatcaccttttaccaatgaaaaacacatttttgctaaccttggtgatgggacttacttccactcaggttacttggcaattcgtcagtctattgccgcaaaaaccaatatcacctataaaatcctctacaacgacgcagtcgctatgacaggcggtcagcatgtagatggtcatttgagtgttgcacaattaactcgtcagctcgatgccgaaggtattaaaaaacaagtcattgtgactgatgaaatcaaactgttaaatgaagaagacggtattgcgccaggtgtagaaattcgccaccgtaatgaacttgacgcagttcaacgtgagctgcgtgaaatttcaggtgtaactgctttaatttatgtacaaacctgtgccagtgaaaaacgccgtcgtcgtaaacgtgatgcttaccctgacccagctgaacgtttattcattaataccgatatttgcgaaggctgtggcgactgttctaaaaaatcaaactgtttatctattgagccagtagaaacagctttaggcactaaacgtcaaattaaccaaagtagctgtaataaggacttcacttgtgctgaagggttctgcccaagctttgtgactgttcatacacgtgatatgaaacgtcctgctaaatttgaaggtattagcgcaggatggccaacatctccaatcattcctcagttatatgatgttccaagtcgtattatggtcggcggtattggtggtacgggtgttgtgactattggtgcacttcttggtatggcagctcacctagaaggcaaagcaacacgtgttatggatatggcaggtcttgcgcaaaaaggtggtacggtttattcatacgtacaacttgcagcaagtgatgagcaaatttcttcaaccaaaattccagcaggtcaatgtgaattactcattggtgcagatgcggtagttgctggcagtggtgcagccctttcacgcttaaaagaagatgctctagtcattgtgaatgaagacagcactcctacttctgagtttattaaatctcgtgactggtatgcgcctattaccgatttaattgatcgtcttcgtggtcgtgttcgtcaaggtcaattggtttctctaccagcggctcgcattgccacactactcttaggtgattcaatttataccaaccagttattactcggtatggcatggcaatctggtcgcattccgctattacgtgaaagcattgaaaaagcaattcgcctaaatggtacggctgttgaaaagaacatcgaagctttccgcgtgggttgtcatcttgcaagtgacccgactttagctgctcgtttacttgcagcaatgccaaaaaccaaaactccgcaaactttggctgaacttgttgaagaccgttctgctcgtctaaccgactactggaatgaagcttatgcagctaaataccgcacacttgtagaattggcagctaaaaagttaccagaagagttaacaggtacgattgcaactcagctttatagagttatggcttataaagatgaatatgaagttgcacgtctactaacaggtaaaagcttcaaagaatcgatcgaaacccaattcggtaaaggcttacgtttaacgtatcatcttgctccgccagcgttacttggtggcctgaaaaatgtccgtaaacgtgcgtttggttactggatgcgcttcccaatgatgatgcttgctcgcttacaatggcttcgtgaaactttccttgacccatttgcacgtcaagaagaacgtcaacacgaacaagcttggcgtgaccgttatatcgcatttgttgaagcacttgttgaagcaccagacaatcataacttggcagttgctgaacaaattgcaaaattaccggcagaagttcgtggttatgggcatatcaaaatgaaagcaatggacgctgcaaaacaacgttgggatgaacttaccccaacactgctaaaagtccgtaactaaaaattaaatctcaaaataaaaaagtcatccttagggatgacttttttattggctcaaaaatttatttagtcattttacgtaaagtcaaaatctgctcgcttcgtccaaatgggccatatacatcatgtaaaactgcactggttaaaccaatgccatccgaaccatattgctgaacggtttccaaacctagccatttcccttgcggataacggtgcatgtggatttgtaaatcaagatttgggaagccccaagtaaattctccttcttgtcttgggacaatgccgtttgccgcatctaccatgccaactaaatgcgcaaaatctgtggtcggctgcccttcaaccatttctttgtcattgtttagccaaacaatgcctttgcccgcgcgatgctgatcattagttttagtgactaatgtctggataaaaccacccggccatcttttcatgcccgaccattcagtaaaggtatcgggatgatgaattggttgatcttcaagccccgcaatctcggaactgtcttgagtacacatgcgccatgccctagccacaatacaagttttaccttgtgcttgtagttctgcttcaatcaattcaatcgttttaccggcacgaatcacatgggtcttaatcgtaaattcaccaaatgcaattaatccaaaaatatcaaaactaattcggccaattcgcatatcttgtcgcggtgaaaactgttctaactctactgcgatgacaccacttgcaggcgccatatgctgttcatgagggttccaagcaccttgcgcatgaacagttgagcaataatgagcaatcacttcaccttgaggaccaattgttctattcagtaattgataataagcattcatgattttctttccttagtccttatacaacttcaatatttgatgaaaattcacgttttaatgcttatgttaaccctctatttcattggctcaactggtttttcctaccaaaaactgatgagtctaaaattacaaatttaatcactaggtaaaatttcgcatgtcaatttcacccagtgattctagaacttatcattcactaaaatgcaaaagcatcttgatcgagctccatcacagattcagctccagactcaatagaagcggcatggctctgtgtacgatgcaaaagcttttgatagaaaaacttagctgtcgttaattttgctttataaaaatcttcctcttgtgtacccgattctaatttttcatgggcaacttgtgccattcgagcccacaaatacgcgaacacaacgtaacttgaaaaataaagataatctactgaagcggctcctatttcttcagggttgtgcttggctttctctgcaatcgatttggtcagtgacagccattgctgcttaagctcagctaatttttctagataaggtttcagcacttcattggattggtgctggctaataaactgatcaattaaatcagtcatgttctttaaaagtttaccttccgacttgaggactttacgtgccagcagatctagagactggatttcggtcgttccctcatacaatgtcgagatacgtgcatcacgtacaatttgctccataccatgctcaacaataaagccgtggccgccaaatacttgaacgccatgctttgcagactcattacccgactctgttaaaaaggccttagcaatgggtgttaaaaaagccagtaattcatcggagtgtttttgctgttcctgatcgtttgaactttcgacaatatcgacatgctgagccagaaaataagccagcgcacgaccaccttcagaaaaagctttttgtgtcattaacattgaacgtacagcgggatgcacaataattggatcggcatttttgtcaggatatttaggaccagataacgaacgcatagcgaggcgctctttggcataacttaatgcgccttgaaatgaaatttcagaagcagcaagcccttgtactgccgttccaatacgtgcggtattcataaaggtaaacatacaattaagcccgcgattttccggaccaattaagtaaccttttgcgccatcaaaattaagtacacaggtggcattgccatgaatccccattttatgttcaatcgcgctacagacgactttattacggtccagcacctgaccgtcgtcactcacattaaatttaggcacaataaatagagaaatacctttagtccctgcaggtgcttgaggtaaacgggctaaaacaatatgaataatattttcagaaagatcatgctcacccgccgagataaaaatcttttcgcctgtaattgagtaactaccgtccggatttggttcggctttagttctaattaatccaagatccgagcctgcatgggattcggttaaacacatcgttccggtccaagccccactaatgagtttagtcaaaaacttttgtttttgttgctcggtcccatgatgctcaattgttctcattgcgccatgagacaatcccggatacattgcccaagcccaattagaaccacataacatttcagaaatcgcaatccgcagcaatgtcggcaagccttgcccaccatattctggatcggccgttagcgaggtaaaacctagctcggcatatttttggtaggcttctttaaaccctttcggggttgtgactacaccttgatttaaatgacagccttcctgatcaccattttggttaatcggcgccaactcattttcacaaaaatctgctgctgcttctaaatattgatcaattaattctcgatttacgctttcctgatattttcttaaaccttgatagttttgttctgtttgaagcatttcatgcagtacaaattgcatatcacgtaatggagctttgtataaaggcatcgttttttcctttcacttcactgcctgtgtcatgggcagatatcgtttttccttaaaatggacttttattgtttcaatctcaccaaaatatcaaaaaatttcttatagcaaaatatattttcactaatttaataaaattatcctaacttagttatagagataaaatataaacatatgtttttaaatacaaatataagataaaaattaattagtcttgtttaactagaataaatttttattttgtattgcaaaattttattccgtaaaaaatcaatttatagtatggtgattagactgcttaatcatgcaaggacgatttatggaaagcccgaaatacacaggtcttgagtttttaaccgctttaaaaaatggtgaagtttctccatcacctatggctcacaccataccgatggaactcattgaagtttccgaaggtaaagcaacttataaagttactcctcgcaaagaacatagaaatatacaaggcggtgtacacggcggcttttgtgccacagctttagatacggcgacaggcagtgcggcccataccctacttgaacatggtgttggctatggaaccattgatttaaatgtaaaaatgatccgccccatgcaggttgatacgtcttactatgcgacggccgagttgatcaatgcgggccgcaatattattagtacccaaggtaaaatcgtagatgagaacggcaaagtgtatgcttttgcttcggcaaccttaatgattattcgcaaataataaaatatctaagctcctatttatggagctttttcttgctttgcaattttgttcatttcataaaaatctaagcgatcaatcaagaaacttaacattgctaaccctagccctaagattgcacatgcttcccatccccagtgtttccaagcatacaccgcaataaaagaacctaaggcggctccgccaaaatataaggtcatataaattgaattaatacgggaacgtgcctcggccgaaattcgatagaccaaattttggttaagcacatgaaatgctgacaaaccgaagtacgccataatcacaccaacagcgtaggcaaccagagactgctgagcaaaaaataggggtatccatgcactcattaataaccccatgcaaatcactgcaattttattttcaagacctgctgcaattttcttacctgcccaaggagtcgcaaatacgccagccaagcccacaattccaaataaaccaatttggaaatcgttaaagtgataaggctcattcgccaaaataaaagtcatggtagtaaaaataagagccaaaataccaaagccaattccccctgccaaaccacggcgtagtaaatgaggctgatgaacagctaatgaaaatagtgaaccataaatctgtagaatattaagttggtgagacttacgcgcaactggtaactttacccacattacccaagcaaacaccaaaatgacaattccgctaattaaataaaccgcatgccaagaccaaactgtagaaagtaagcctgcaatagagcgcgctaataatattcccaagaacaaaccactcatgagagtgcctacaacttgagggctttttttcgggcttgctaaacctgcggcaaaaggaaccaaaacttgagtcgcaatcgaaaagaatgtcgctaaaaaggtaaagccatataaagctggcaaggtttgacttaaggatagccctacttgtgcaaaccccgtacagcacatgagcaagcaaatataactgcgcttttcaaaaaagtcgcctaggggaaccaatataaaaagaccaactgcataggacagttggctaatcacaatagttaaagcaacttgatcggcattaacttttaatgcttcagcaatcgaatagattaagggctggttataatagtttgaacccgcacaaattccacatgtcattgccatgataaaaataaagctttttgacagtatattttctgcattgggctcaactattttttccatttttaactacgccctattttaaaatttatacatcgaaacaaagtttacacgtgatacatcagcggttctgccatcaaacacttctcgtttgccttgatgatattccataccaatatccatttgctcaattggtgaataaaagacgttagctgcgtagtccgttaaacgtttattagcatctgggttgagtttggcatacgccgtgtcatcatcataatcaaacattgaagccgataagtttgcacgccattgctcattaaatttatatgaatagccaatattgatgctattcaacttattcataaccaaatctgttttatcttcgtttaaagagaaatcacccgcggcatttaaacttgttgaatttgccaacccactttgggtggtatacggcataaatttttgatcaccgacaatatattgataatttgcttgtaccgattgctgtggcgtgagttgatattttaagccgcctccagcaccccaacttactttcttcaccgtggcagttgcgacatctgtggatttttcattaataaagccttgagcaagtgccgttaaaggaccttgtttaaaggtatagcgacccgttaaagttggaaatgccgatactctcgaacctgtatattccaaagctacttttaaatcattattggcatcaattttccagtcataacgaatttgaggagtacgcgtataagaggttcccacaaattgggtgtaatcaacagcttctgtacgggtttccatgttggacatgagtgaccatgtttggccaaaggtccagtctttataagtgaaaaaagcatgacggatgcggaatttaccatcccccgttcccatgttagaactatcaaagaaatcggcctcgatattccctgtaaccgctttatttgggctattaaaataaacgcctaatcggcttgcattaatcatggcatcagagcgtgcatggtttgaacgtttttcactttcaaaaggtgttcggtacaggctgctggtcgttctaccacccgaatcaggcgatgatttaaaatcgaccgctgcatcaatacgggcaataccgtaaaccttgacgttatccgtccaagtgacccatgaaggagcaactggcttttctgttaccgttgctttagttttttcaatgttctcttcgatcttaacctgtttgacctgtaaattattttgagtttgtttctgagcagcaagttctgcttttaatttttgcagctcagtttctagcaaattaattctttgttctgtcgtatctgaagaatttgcaaaaatagtccctgaagccgcagcacaagctgcagctaaaattaattttttcatcttttaatccttaaagaagcgtttttccgtgtgtatttaggctacacgtgcatcgattagttcacagtcagtgactgcctgtaattcatcaaaagttaagccgtctaccatttccttgacgtaagctttttgatctttgagttcaataatgcataaatcggtataaatacggtttacacactgctcacccgttattggatagctcagttcttttacaattttgggctcaccttttttagtgacatgctccatatagacataaatcgtttttgcaccgactgccaaatccatagcaccgccaactgccggcacatcatctgccttacctgtatgccagtttgccaagtctccatttaccgcaacttggaatgcaccaatcacacaaatgtccagatgaccgccacgcataatgtcaaatgagtcgccatgatgcataaagcatccgccgtctaacaaagtaacaagttcttttccggcattcactaagtcttgatcttcctcacccggttgtggtggtggaccaaaagccaaaaccccattttccgaatgtaaaaagatttctttgtcttttggcaaaaatttagcaacgttggtgggtaagccaatgcctaaattgacataagaaccttccggaatgtcattggcaatgagtttagcaatatcttcacgagaacgcttttgaactgacattagatatctcctacttttacaacgtgctgaacaaaaattcctggtgtaataatgcactcagggtcaagcgttcctagctctacggtgtcattcacttgaacaatcgtggtcttggcagcttttgccataattgggccaaaattacgggctgctttgcggtaagttaaattgccccagcgatcggctttatcggcataaatcagtgcaaaatcagcttcaagtggatattcaagcacatagtttttaccgttaatggttcgggtctctttaccctcggcaactttagtgccataaccagtcggagtaaaaatagccccgagaccagcacctgcggcctgaatacgacaagccaaattaccttgtggaaccagttctaactcaatttttcccgctctatataagtcttgaaaaacggttgatccagcagatttcggaaatgaacaaatcatttttttgacacagccagcaataatcagatttgttaaaccacgatcaccagaagctgcattgttatttacaatggtgagttctttttttcctaaatcgattaaggcttcaattaattcagcaggttgccccgtcacaccaaacccgcctgtcatgatggttgccccatcaggaatagcttttaaaatcggttcaatgtcactggtgattttatttatcatctcacttgtcccttttcatccttaatttaaggtgacagattgatctgtcactctgccttttgcgggttaaataatcggtctttaataaataacaatggaattaccccgcagataaaataagctgcagccatcaccaagagtcctaaaccaatagaaccgttttgcgatagataaccaattgttaatggagagaaaattgaaagtactttgccaatgttataagcaccgcccactgccgagcctcgaattgaagtcgggaagctttctgtcatataggtggcattaattgcatatggaataccgtaaaggaaaccgaagaacagcatcatccataaaatgttggttggtgtatttaaataaacaatgactggaataaataaggctgtaccaatggttccgaaagcaaatacagcgcggcgtcctaatttatcggcaacgatccctgcgatcactttggcaaacatcataattaggaatgtaccgaccatatacatcgccatttctttaaacttgatgccaaggtcagactctaaataagcaggtaaccagttacttaccccgtaataaccaaactgcaatgcaccagtactaataatccaaagaataaacatggtgccgtgttttttatctcttaaaatctcaagatatggattttgacgttttttaggttggttactttgagcgacttctagcgcttttagttgacgggcttttttccatgactcaggttcaggtacacaaaagtgcatcaaaactgacaaaaccacaggcgtaattgcaatccagtataggaaacgccagccatgttcaggaataatatgtccagctaataaggtcgcgagtaaagaacctaaggtgtaccccgtcatgagagtagctaaaacagtcgagcgatgtttggttggcaccatctcagacattaagatattacaggcaatataaagtgcacctaagcccatggcgcctattgttcttaaaactgcaaattgcatataagaatgtgtaaagccgagtgcacaggttaatatcgaagaaaaagcaataaagaaaacaataatgcggacccgaccaaaacggtcgcaagcccaaccaccaataaggccacccacggccgaaccaaatagtgtcaagcttcctaatgttccggcttgcacaccagttaaatgaaactctgctttaagactagtgaggcttaatgccaaaaaacctaagtcggccccgtcacataaaagtgtaaaaaaagcgaatataaaagctgtaatccaaatcttttttggtgtttgaatagcttcagtgctactcatattctctgtaacagtctttgttgtcatgtccatatcctcagaaggaacatgaggcatcccatgcctcatggcatttgattttttattaggctgtagcttccctaatcatgtttttggcaataataagttgttgaacttgcgtggttccttcatataaacggaacaaacgcacatctcgataaaaacgctcgatggcatattcactgatatagcccgcaccaccgtgaatctgtacacagcggtcagcaacacgtccgcacatttcagtcgcaaacatttttgcgcaagatgcttctgtactaatgttttcgccattatcacggcggcgagctgcatctaggaccatacatttagctgcataaatctcggcttttgagtcggcaagcatggcttgaataagctgaaagttcgcaataggctgaccaaactgtttacgctcaatcgcatagtgcaatgcgtcgtttaacatgcgttcggcaacacccacgctataggcaccaatgtgcaaacgccctttatccagcactttcatggccgttttaaaaccgacaccttctacgccaccaatgagtgcagaagcaggtacacggcaattttcaaaaatcacatcacaggtatgtgaacccttttgccccattttttggtcaattttgcctaatgtaatgcccggtgtattggcctcgactaaaaaagctgaaatgccacccgaccctttaatttcaggattcgtccgagccattacggtaaaagttgcagcatggggtgcattggtaataaaacgtttggtgccgtttaatacataaaaatcgccatcttttacggcactggtttttaaagaggcagcatcagagccagattcaggctcggttaaacaaaatgaaccaataatttcgccacttgcgtaacgtggtaaatatttctgcttttgctcttctgtgccatcaatcaaaattgcacttgagccaataccgttattagtaccaattaaagaacgaaaagccggtgaagtttgtccaagttcaaatgcaactctgacttcctcttccatagtgatgcctaagccaccatattcttcgggaattgtaagaccgaacaaaccaagctcacgcatttgctgcacaatgtcatccggaattttgtctttctctaccacttcgttttcacgagggatcaattcattttttacaaaatctcgaattgttgaaagtaactgctccaacatcccttcatcacggatcatctgtgatctccctttttatgtatttccatcgtacccatcagccatctccagcttgtctggataccatgttttaaatcttgtttactgcggatgtgtttcatagtacgagaacaaaaatacaaatttcaagcttttttgaaaattaatttcgtttaacgaaatttaaaattagaccaatacgtaatatcaataacttagattttttaaaagataacaactacgctcttaaaagaaataagacttgaaataaattccaaaataagcatcataaaaggaatatagttttgatatgcgaaacaaggaattcaaaaatgagtgtgtcaacagggaataatttcgtagaagtcgacttttctattcaaaaaatagcggttgttaaaattaaccgcccagaagcaaaaaatgctttaaacggtgaagttcgtaaacaactcgcacaagcttttaccgagttaagttttaacgatgagatcaatgcggttgtgctcacaggcggtgaagaagtctttgctgcaggtgcagatctaaaagaaatggcaaccgcaacttccacagaaatgttattgcgtcatacagaacgttattggaacgcgattgcccagtgccctaaacccgtgattgctgccgtaaatggttatgcattagggggtggctgcgaacttgcaatgcacgctgacattattattgcaggtaaaggtgcaacctttggccagccggaaattaaagttggtttaatgcctggtgctggcgggacacaacgtttattccgtgctgtgggtaaattccatgccatgcgcatgattatgacaggcgccatggtcaaagccgaagaagcttatttgattggtcttgtttcacaagtcacagaagatgaccaaactattccaactgcaattcaaatggcacaaagcctcgcaaaaatgccgccgattgccctgcaacaaattaaagaagttgcgttgatgagcgaggatgttccattaaatgcaggcttaactctagaacgaaaagcattccagttgttgttttctacggaagataaaaatgaaggcgttcaagcttttatcgaaaagcgtaagccgtcgtatcaaggtaaataatttaaaaccataataacaaaggaatgaaaatggccaggaaagtattaattagtgcaggtggttcagggattggacgatgcattgccgaggtatttttaaacaatcaggatgaagtttttgtttgtgatattaatgctaaaagcctagaacaatttcaacaagattatccaaagctacatatatatacctgtgatttggctgatcatgagcaaattaaactgatgtttagtcaagccattcagaaacttggcggtattgatattttagtcaataacacaggcatctccggcccaaccgttgcagcagatgagctaagttttgaagattggaacacggtgattaatttaaacctgaatagcacttttttaattacccagttagccattccctatttaaagcaagcacaggcaggcgtgattataaatatgtcatctattgccggacgcttaggctatccatatcgattggcctattccacttcaaaatggggactgattggttttaccaaaacgctttctatggaactcggtgcagataatattcgagttaacgctattcttccgggtgcagtcgatggtgatcgggttcaacgcgtattacaggcccgtgccgatgtagcgcagacctcacttgaagaggtgactcaaaatgcactgaaaaatcagtcgctcaaatattttgtcaatccaaagcatattgcagatttatgcctatttttagcgtcagacagtggtcgctcaatttcagggcaaatcttacccattgatggtgataaacaatgcttaagctaaatcacctaaccctatttttccgtttaatttcaaatatagatcaataatcaggatgatcgacatgacttatgatattaaaagcatggctgtgattggtgtaggtgtcatgggcagtggtattgctcaaattgctgcacagtcaggtcataccacttatttatatgatgccaaagcaggtgcagcagaacaggctaaagaaaaactggctgctacatttcaaaagttagtcgataaaaataagattacatctgagcaagcagcagcggcaaataaccatttaattatcgctcatcaaattgaagatttaaaaaattgcgacctcattgtagaagcaattgttgaacgtcttgatatcaaacaaagcttgatgcagcagcttgaagatattgtttcggataatactattttagcctcaaacacctcttctctttctattacagccattgctgcaaattgcaagaagcctgagcgtgttgtgggttatcacttttttaaccccgttccactcatgaaagtggtcgaagtcattcgtggtttaaaaacagacccacttattattgatgctttaaacgatctgtctcgtgcatttggtcatcgccctgttgtagcgaaggacacccctggatttattattaatcacgcgggccgagcttatggcaccgaagcgctcaaaatcttaaatgagaatgcctgtgatatcagtgaaattgatcgaattttacgtgacggcgtaggatttagaatgggtccttttgaattactcgatttaacaggccttgatgtttcgcatccagttatggagtcgatttatcatcagtactatgaagaagcccgctacaaaccaaacccgctcaccaaacaaatgctagatgctaaacaacttggacgtaaagttaatcagggtttttataactatgaaactggttcaaaaacaggtgaacaacctgcgaagtttgtagagcgtttagcaaaatatccaaaagtttgggtcgctgccgatttcttagacgataaaaaacagctcgaagattatttaactcagcaaaatattaccttagacaccaattcggaaccacaaacagatagcttatgtttgctcgcttgttacggtgaagacacaacccaagcggctactcgccttgggattaacccagaacaagccgttgctatagacatgctttatggcattgcaaagcaccgtaccttaatgccttcacttgttaccaaacctgaatatcgtcaagcagctcactctattttcaatctagatggaaatatggtcagcatgattgctgaaagtattggctttgttgcgcagcgcgttttagcaatggttattaatttaggttgcgatattgcccagcaaaatattgcaacggtagatgatattaatgctgcagtacgtcttggtttaggttatccatttggtccaattgaatggggcgatcaagtcggtagcgaaaaaatcttacttattctaaaccgtataacagcacttacgcatgacccacgttaccgccctagtccatggttacagcgtcgagtcgcactccacttacctcttacttttactcatgagtcttgaaaaggaatttctcaatgttaaatgcatatatttatgatggtttacgtagtccatttggccgtcatgcaggtgaacttgcctcaattcgtcctgatgatttggccgcaactgtcattcaaaaactactagaaaaaactggtgtaccgggcgctgatattgaagatgtgattttaggcgacactaaccaagcgggtgaagatagccgtaatgtggcacgaaatgcattattacttgcaggtttacctgttactgtaccgggccagacggtaaaccgcctatgtgctagtggtttaggtgccgtgattgactcagcacgtgctattacttgtggtgaaggtgaactgtatattgctggtggtgtagaaagtatgtcacgtgcaccctttgtgatgggtaaagcagaaagcgcttatagccgtgatgcaaaaatttatgacaccaccattggctctcgctttccaaataaaaaaattattgctcagtacggcggacattcaatgcctgaaacgggcgataacgttgcagccgagtttgggattagtcgtgagcaagcagacttatttgcagcccaatcacaagccaaatatcaaaaagccaaagaagaaggtttctttgccgatgaaattactccaattgaggttttccaaggcaaaaaattgccccctaaattcgtttcagaagatgaacatcctcgcccaagttcaactgttgaagcactcacaaagttaaaaccgctatttgaaggtggcgtggttacagctggtaatgcctcaggtattaatgatggtgcagcagcacttttgattggttcagaagcagcaggtcaaaaatatggcttaaaaccaatggcaaaaatcttatcagcggcggctgcaggtattgagccacgcattatgggtgcaggtccgatcgaagccattaaaaaagcggttgcacgtgctggccttactttagatgacatggatattattgaaattaatgaagcctttgcttcacaagttttatcttgtttaaaaggtttaaatgttgattttaatgatccacgtgtgaacccgaacggtggtgcgattgctgttggtcatccacttggtgcttcaggcgctcgtcttgcgttaacagtagcgcgcgagttaattcgccgtaagaagaaatatgccgtggtgagcttatgtattggtgtaggtcaaggtcttgcgatggtgattgaaaacgtttcataaccattgaaccggatatccattcatcacaacagcgcagtgatgaatggatttattttgcagagcgaaatataatggcaaaactattgctttaattatatttgaggatcgaatgtctcaaaacacggaaactgaaaaaccaataaattttgatgagatacgtttagatcctatttcgcatatacatcgggaaaacaacccgcaatttattgcttctttagcacgcggtttagaacttttaagatgcttttctgcaaataatcaggtgcttggcaaccaagaattagcaaaaatgacaggtttacctaaaccgaccattgcacgtattaccaatacccttgtgtcattaggttatttaaaacaattgcctaactcgaccaaatatacattagatattggcgttttatctttaggatatgcagcattatctaacatctcgattcgtaatattgctcatcaatatatggaagagatgagccagtatgttcaagcgcctgtagcgatggcaacgcgtgatcgcttaaatatggtgtatatcgatgttgtgcaaattgaaactgcattaaacatgcgccgtccaattggttcaactttaccactgcatagcagttcaatgggccgagcatgcttagctgcgacccctgaacgtgaacgcaactttctacttgatgcactaaaacaaaagaaccccgaaaactggccagccataaaacgctctttagaacgagctttccgtgattatcaagattatggatattgtttgtcgttaggtgagtggcataaagaagtgaactcggtggctgtacctttggttagttctaaacacggtctttatgtttttaactgtggtgcgccaagttttcatttaaatccagaaaaacttgaaggtgaaattggaccacgtttaatccacatggtgcacaatattcaagatgctttgaatgaaacgcactaacaatcgtgcttagacagtcatggttgtgttgattaaggttccactttcattatgactataggcatgatgaaaaacgcactctataccccaaccattattttaatggcgattgccgcaggcatttgtacaggtggaaattattttagtcagccacttattcactcaattagtgtaagcctaaatttaaccgaaacaaccacagcgtgggtgcccactctagcccaaatcacctacgcatgtggcttactctttttaatgccattaggggacataatagaaaagcgcaagctactatttatctttatgttattggcttcaagtggattaattattagcggtttttcgcacaatatttatcttttactgcttggcactatcattactggtttattttccagcgcagcccaactgttgttaccgcttgctgcaagtctggttccaattcaacaaagtggccgtgtcgtaggctttttactgagtggactgatgatgggggttttaatcgcccgctccctttctggactgatgtctacactttttgcatggaatattatttatctggttagtggttttctgttacttgtgattgcctttattttgcatcgtaatatcgggttatttccaccgactaaatctgaaaactatgcgaaaaccattcgttctttaccacagatttttattcaaaatcgacgtttaaggactagaacttatattggtggttttacatttgcatgcgtgagtttaacctttaccaccatgtcgttgcttttggctccggcgccctatttttttagtgactttaccattggccttttcggttttgttggcgtgttaggaactttcgttgctaatttttcaggcaaatttattgaccaaggctatatccataaaatttcaatttattgcggcattggccttatattaagttggattcttttttcacttttaccctaccattttgctttttatattattgccttactcattctctacgcttctctttctgctgtacatgtcaccaatcaaagtattgtatttaaacttaatcaagaattacgttcacggtttaatgccatttatatgacaggttactttgctggcggcgctttaggcacaacagcgggaagttatgcttggaaacactttggatggacaggtgtatgtattttaggcttaatttttgccgttttatgtctttattattgtgtacgtgatgcaaaaaatcagcacaattaaaacttgtgctgatctcaaaataggctaatagttcgttataaaagccctgataaacgtccgcgaataatatcttctgcctctttgacaattcggttaaccagttcatcgcatgtcggaatatcatgaatcaagctagccaccaacccacatgaccatgctcctgcattaacatctccatcaatcatgacttttggataaacccctgcaacttcttcaataatatcttcaaacttaatgttatcaccgagtgctttttcttttgccacgattttttctacggccgcattattcatgacacgttcaatatttcgcaaagcacgcataattaaacgcgtatctcgttcggttgcattcagaatcgcctgtttcacatttgcatgtacgggagcttcctgagtcgcaataaagcgcgttcccatattaattccatcggctcccatcgctaaagcagccgcgagtgagcgcccatctgccataccacctgaggcaacaaacgggatgtctaatgcatcggctgctaagggcaataaaatcatatttggcacgtcatcttcaccaggatgcccaccacactcaaaaccatctacagaaaccgcatcacatccaatttgctgagcttttaagctatgtcgaaccgaagtacatttgtgaattactttaataccagcagcctttaaatatggcatcacctgttcaggattacgccctgctgtttctacaatctttacgccacctttaataattgcctctacaaaacccggataatcaggagtatttacggtaggtaaaaaggttaaatttaccccaaaaggtttatcggtcatttctcggcaacgtgcaatttcttttgccagattttcaggtgtacgctgagtcaggccagtgataatacctaacccgcccgcgttcgaaaccgcagcagcaagctctgcaaaaccaacataatgcataccgccttgaataattggatgctcaatttcaaatagttctgtaattttggtcttcatattctttccactcactgttctatagccagcctcttatttccctagcagggctagatgcttatttacacataaatcctatcagtatttaaagtaatttaagttaaaaatttcacaatacaaaattttataccacaatataaaacaaaataattgataacggaattatttttcgatagcatcagtttaaattttagacggaaaattatttaaaggaatgaacgatgcagcagaacaacaaaacccaaagcgagcttaaaacaggcacaattcataagtattttgatagaaatatactaacgctcaccatgagtaatgccactaaaaagaatgcaattaattatgaaatgtatgcagctttaagtcaggcattagatcaagctgcaaccaatcaagacattcatgtggttgtgcttactggtgaagactccgcatttaccagcggcaatgatgtaaacgcatttgaaaaacgagataccaccacttcagaaccacccgcttcgattgttttcttaaaaagcttagcaacttttccaaaaccgattattgctaaagtaaatggtgtggcaattggcattggcagcactatgcttctacattgcgaccttgtatatgcaagccaaaactctatttttcagttcccctttgtgaatttagggcttgtacctgaagcgggttcaagttacatcttgccaagattattgggctttgctcgagcttcggaaattattttactcggtgaaaagttttcggtggaacaagcaaaaaattatggtctggtaaatgaaatatttgaagccaatgagctggatcaagtggttgaagatgtggcaattaaacttgctcacaaaccaagccaagccttacagctcagtaaaaagttactaagagatatgccaattgatgatctactcaatcgtattgaccatgagtcgactattttctcgcattgtttacaaggttccgagtttaaagaagcattaagtgctttcaaagaaaaacggaaaccgaactttcataagcaaacagcctaaagcttacccaataaaaagccagccttgaaaaaaacaaagctggctcttataaatggatcaaataggtttagctaatctcggtacgaatattattcaccatatgtaaaagacgtggtgcaatatcttcttcgagtttttcacggttcataataaagcttggaccaccacagttaaacaccaataaaccatgttgttcatgaatgagtggaaccgcaaccgaattgacatctttatgccattcgccaatagaaaaacagtatccaaaatcttggtaatctttaaaggctttgtctaaatcacggttaattttgatccagtcttctttgtgcttgttacgaatggcattaagtaagaactctctttcatcttcaggcattgcagctaaacacgcacgtcccatcgaacttaaatgaatcggtaaataggttccaacttgacggcgcatggtcatattgcctttgccttgcaccacatcaagataaatcatgttcagtcgatcacgtgttgccatggctacagcagcgccagcatagtctgccaaatttttcatatatggatgagcaatagagcgaatcgatacgttagacagcatcgaataaccaaacgcaagaactccaactgaaagctgaaatttgcttgagttaggtacttgtttgatataacccaaacgcgacaaggtatgtgtgaggcgagtaatggttggttttggcaaacctgtcatctgagcaagctcttgattgcccaaatgctgatgtttaggcgtaaaacaacgtaatagctctaaaccacgtgctaatgcagtaataaattgacgatcattttcatcctgcatgtcttcaatcggatgtaataattcatgccttaaaggcgctaataatttttctgtctgttctgcatcaactgcatcattcattgtcataccaatccatattttgtttcgcactgcgaaaattataatctattttttctataaatagcaaaagagcaaacatcctagtctgcattttaaagataacttcatttaacttattaaagcgaaagattaaatattttattttctgattttaaatataattttaatcttccgcttctaagccacctacccaattacgcccttttctttaagctctgctagtttttctgaagaaactattcgccccaaaacggcctgcgtatgctcacccaacagcggaggtgctgttttgtactcaactggcgttctagaaagtttgattggtgacccaattaccttcagtttttcacgttgaggatggttcatctcgactaacatttcacgggcaatcacttgcggttcttgaaaagcttgttccaagttattgattacacctacgggaactttagcagcataaattgcatctacccattcatctgctgtttttgttaaaaagtgagtttgtaaaattccgataatttcatcgcgatgcttaatgcgatttgcatttcgggcaaaacgtgcatcgtttggtaaatcgggtaaaccaatacttcgacagagttgaataaactgagtgtcatttccacacgcgataataaaatcacggtcagaagctttgaacacttgataaggcacaatattagcgtgtgcattgccataacgcttagggatatttcctgatgacaaataattcattccctgatttgccattgtggcaatttgaacatcaagcaaagccatatcaatatattggcctaaacccgtcacatggcggttgagtaaagcagcctgtatggcaatcgtagaataaagtcccgtggctaagtcagaaaatgcaacgcctactttttgtggaccaccacccggcaaatcatcacgctcacctgtaactgacatgagtccgcccatgccctgaataataaagtcataaccgggctcttctgctcttgggccagtttgaccaaaaccagtaatcgagcaatacaccagtttagggttaatcgcagataaagactcgtaatccaaaccgtacttctttaaagaacccgctttgtagttttcaatcacgacatcggtatcttgaataagcgctttaatcaattcttggccatcaggattggcaatgtcgatggcaaccgatagtttattgcggttggttgactgataataagcggcttcttgagtatcttggcctgagtcatctttcatccaaggtggtccccaagaacgggtatcgtcaccaactttcggccgttcaatcttgattacttctgcgcctaaatcggcaagaatctgcccacaccaaggcccagccaatacccgacttaagtcaagcacccgaattccatttaaagcacccatctttatcccactatattttgtgacttatttcctataggaaaacttatccatttaaaatttcgcatagcgatatatatttttaatatacacacctcttttgaaaaatcaaactttaattttccactaaaaataatgattttttacaagaaaatatagcttaaataaatcaacaaattagccaaatataaatcaacaacagagtatcgcattgcgaaattaattttcaaaatatattgttttgcgttcgtcctttgattactatcacttcaaatattggtgattttacgaacatcacattgatgttttctgcatgtagtaaaaggacgagactatgattcgagatcaggaaaccttaaatcaacttgttgatatgattcgacaatttgttgaaggtgtattaattcctcatgagaatgaagtcgctgaaacggatgaaattcctccagatatcgttgagcaaatgaaagctctcggtttatttggtttaaccattcctgaagaatacgaaggtcttggcctgacgatggaagaagaagtctatgtggcttttgaattgggtcgtacctctcctgcttttcgttctctcattgggaccaataatggcattggctcaagtggcctgattattgatgggaccgaagcacaaaaatcctttttcttaccgcgtttagcacgtggtgaagtgatcagctctttttgcttaaccgaaccggatgcaggttctgatgcggcatctttaaaaaccagtgcagtaaaagatggcgatttttatgtgttaaacggcaccaaacgttttattaccaatgcacctcatgctggtgtatttacagtcatggcacgcacaaactttgacattaaaggtgctggcggcatttctgcttttatcgtcgatagccaaactccgggcatttctcttggcaaacgcgataaaaaaatggggcaaaaaggcgcacatacctgtgacgttattttcgaaaattgtcgcatccctgcttccgcactcattggtggtgttgaaggtgttggttttaaaacagccatgaaagtactcgataaaggccgcttgcatattgcggctttgagcgtcggtgcagcaacacgaatgctagacgattctttaaattacgccatcgaacgcaagcaatttggacaaccgattgctgaatttcaactcattcaagccatgcttgccgactcaaaagctgaaatttatgccgctaaatgtatggtcttagacgctgcacgcctacgcgatgcaggacaaaacgttagcactgaagcctcatgcgcaaaaatgtttgcaaccgaaatgtgtggccgcgttgctgatcgctgcgtacaaattcacggcggtgcgggttatatcagtgaatatgccattgaacgtttttatcgagatgttcgtctgttccgtctctatgaagggaccactcaaattcaacaaatgattattgcccgaaacatgattcgcgctgcgtcttaatcaaattttaagcactttaaaacgacttgaagtgctttttatcaaatgtaggtaatggattatggctacaaattacaaagacggtttttctcgtatacaacctcatacgtggaaaatagcatttatttttgcatttctagcactattggtagatggagcagatttgatgctgctgtcttatagcttaaatagtattaaggcagattttggattaagttcagtacaagcaggtatgcttggcagttttacattagcaggtatggctgttggtggaatttttgggggatgggcgtgcgataaatttggtcgcgtgcgcattgtggttatttctattttaactttctcgctcctcacctgtggcttaggtttcacccaaagctttcttcaatttggtattttaagattttttgcatcactgggtttgggttcactttatatcgcctgtaataccctcatggccgaatatgttccaacccgttatcgcactacagtactgggcactttacaagctggctggaccgtcggctatattgttgcgaccttgcttgcaggttggattattcctgatcatggctggcgcatgctgttttatgttgcgattattcctgttgttattgctgtcctcatgcatgtgcttgtaccagaaccagaagcatggcaaaagtctcgactacaacaaccagtcatggctcaaaacgcatcgaaaacctcggcatttaagcttattttccaagataaacgaaaccgtaatatgtttatcttatgggcgttaacggcaggctttttacagtttggctactatggtgtaaataactggatgccttcatatctagaaagcgaactgggtatgaaatttaaggaaatgaccgcctatatggtaggtacatataccgccatgattttaggtaaagtccttgcgggcatgatggcagataaattagggcgccgttttacttatgcttttggtgcaatcggcactgctattttcttacctctgattgtcttttataactcgccaagcaacattctatatttactggtgacctttggtttcctctacggcatcccgtatggcgtaaatgcaacctacatgaccgaaagctttgggacagcaattcgcggtacagctattggtggtgcttataacgtcggacgtttaggcgctgcattagcccctgcaacgattggtttcttagcctctggcggctcaattggtttaggttttgtcgtcatgggcgctgcctacctcatttgtggtgtgataccagccctattcattaaagaaaaaatatacgacccacaaaagtcgtaaaaagatctatcaaataggtcatatgcctatctgattgatagtgctaacgatcgaaacatgttttttaaatcgttagccaaaaataaggaattgacgtttcaaagttattccttatttccacatatgtagagtttattactcttcattttaattttttaggtaagcttagctcccaagggagctaagcttaaaaatatattggcctaaattatctttaaggtcgttcaccctgctccaaacggcgttcaatatcatctagtatgtttggtaagtcagcgacactatcaatcacatagtgagcgcctgacgcattcattttttggtatgccttatcttttagcacaatttgttcatcggccgataatgcgctccactcttcatagcttaaaccgacttcattgccactaattgcaagtcctactgtccaacatcccgcatttaaaccttcatcaatacccaccacggtatcatctacttttacaacagttttgatgtccgatacgtcgagttgaattaagttcttccataacatttcaggatatggacggccatatttcacgtcgctagcagtaacgatacagtccggtcggtaaccctgatcagcagcatctttaactaaacgaccaatcatcatggatgcatagcccgtgttactgccaatttttgcaccacgctttttaatattttcaaaagtagctaatgcccccggaattaaagcagaacatttcggaatagaatttaactggtacggaataaagtctttatataaacggtcaatatctgcttcagttgccgcctgcccgtatacttcctgccatgccgctgctacacgcggcatttttaaaacagctgcaatatggtcacgtttttctaaccccattggggcacgcgcttcttcaaccgtaatttcaactttattgtctttaaataaagccataaaagctaaaattggtgcgcgtgagccaaaatctactgttgtaccagcccagtcaaaaaccacagcctgaatttgtgtgttgttggttgtcatgatgtatccccttaatttaataaaaattatgctgttacagcttggtttaggtggttttcgcagtagctcgcaattgcagcaagaagcccttcaatatcttgaatataaacttcgccaatattgcctatacggaagcagttgagatctgtgactttgcccggataaattacatagcctgatttttttagcgtttcatagaatgactgaaagctaaatttctcggctgttgggtaaagaaaagtggtaatgatgggtgattgtaggcactcttcaccaagtaccaactcaaagccaagttgttgcatacctttagataaggtttgttggttttgtaaataacgttgataacgtgcagcaacaccgccttctgtctcaagctcaagtaatgcttgataaaatgcacgtaccacatgggttggcgaggtaaaacgccatttgccgttatgctgctccatggtattccactgatcatacaaatcgaggctaaccgaacgtgccaaacctttacatgcttctagacaatcacgctttgccaaaataaagccaaagcccggaacaccttgaatacatttatttgcacttgaaattagaaaatcaatttcaagctcagccatatccataggtactccaccaaatgaactcatggcatccacaatccagatttttcctgccgctttaactaaacggcctatctcttgaatcgggtttaaaataccagtggtggtttcacagtgcacacaagcaacatgactaatggttttatcttttaaaacacgctcaacttcttgtaaatctggtgtttgggtttctaaatagttcagctcgatcacttcaatatttaggcaacgcgccatttgcaccatacgtgcaccatatgcgccattattaatgatcaagattttgccatcacgtggaatagctgacccaagcacagactccacagcaaaacttccactgccttgcattaacacagccgtatatttttcaggttcgctggttgccaactttaccagtcgattacgaatatcttgtaccagcgagttgtattcttggtcccaagtacaccagtctttttgcatggcacggcgtactgttgccgatgttgataatggtcctggagtaagaagcaaatacttgttctctaaatccatatcgagttggggttgcatgttcataatgttactcatttctttcgcgttcatttcaatatacatcaatctggtttaaaccagatgacaaactagtaaatattttgttctaatatttctttcataaagccagcccctgtagtcatgcctttgccagcaatcgcactcaccagaaagatatttttttcagcttcagtgacacaggccaactcatgttcatgggtcaggtaataaccattccaacgtttttgaattggaggtaaattcagccctagtttttcatggcagtaaacttggataaattcattaatctcttcacgctgctcgaactgaggcgcttcattaatcgaatgatattcatgactatcgcctacgatcagttcgccaaattcgttttgtttaatcagaatatgaataccgaattctttaatgaaaccctgttgtgacgctttaaccagctcagcatgacttgggcaaatttcaaaagccggataacgtgaaatagataagcctgaataaagagaagcatttaatttttggtgaaaccgttgagtcagggccatttgtaagccacagcgtttcagattcaagctttgtaagagatccggatataaaacatcgatgatttcaccgtggcagatcaaaactttatttgcccgatatgcctcgccacttgccaagcgaacctgacaaatttcatgttgatattgggtttgaacgacacaagcattggtataaatatttacgccttttctttcggcatatgccaatagtcgctgcccaaccacatgcggttcgaccgaataatcttcttcaaaaaccaaaccgccttgaaactgctgcgaaggatttaaataagaaaattgggtgaccaattcctcatggctaaacaaatgaactggaatttggtaattatttgcacgctcggcaaactcatttaaaacctgccattcaagtgccgtgtttgccagatagacaccttggcgttgagcaaacgaaatatcggtttcagtttgaatacgctgataaaaagaacgcgtttcaagcgcgtactttcgccactgttgctctggatgggttaaggtcgatgttccgaccatgccgaaattacggcgagttgcgcccacaggcttggcatttttctcgaagatgcaaactttcaagccttgttcttgtgcctgtattgcagcggacaaacctaaaataccggctccgacaacaattaaatcaaactgtgcattattcataagacttccaatttgcgaaatttaggatgaataaacccttgccttgttgaacaaagcatttcgtttcagtcggttaaataaaaattgtgtttagctaaaacttagtgagcgctttcacgccattgctgacttcttgccataatttttctggtaaataaccaatgaatgagttttacaacacatgaggtggttaaaatcaaaatgctcatcgcaacagcagcaaccgtgtctcccgcatcatccatatttaaaacagctaccgcagctaaactggtgtctggtgaatagaggaaaatggcagccgatacagtggtcatggcattcacaaaaatatagaccgatacatcgcatagcgctggaaaacacataggcaaatacactttccaaaaggttttccacttcgatgtacctaaagtttgtgctgcttggtcgagctgtagcggaatttgtttaatcgcattggttaaagtcagatgtggcacggtgtaataatgcacaatggttgaaatcaccaaaatggtcatggttccatacagcacgtttaacggattactctgctggttaaaaaacaaaatataagcaatacctagaaccagccccggcacagcaagtggtaataaaaccaaagcttgcacatagtttttaataagtggatgtgccttaaaacgttcggttaatagtgccaccataaaaatcagtgctgttccaaaaaccgtactaaagagtgccatgcgaaccgagttaaagtacgctgcccaaccgccaccatcgacatattcaaaactgtaatgcgctaaggtcaaagacaaatcataaggccaagactgaatgaatgaagccagcactgccgtaaaaacaatcagtaaaatcgaacctgaaaccaaaccacaaaatatgcttagaacaacttcaagttttttattcgatgctgaaacataaggtttagtctgaaaggcttgaaaccgtgcatgccgcttgctttgtattcgatcaaaaataaatacaaacactgctggtagcaacaataagatggaaatcaccgcacccatgctcatattttgctgaccaataatctgtttatagacatcaagcgccatcatgttaaatgaaccgccaatgactttcggaattccgaaatcggtcaatacataaataaaagccactagacttgcgctaatgagtccataccgaattgctggtagtgtgacgtggtaatgggtcttccagatatttttgccgagcgacaaagatgcctcaattaaacgctgatcgacactgcgaaaagacaccatcatcaacattaaaattgctggaaatagccaaaagcagtaactgattaaaataccgattggaccataaatttgtatatcgcccagcaaaggtttaaacacaccttgcttaccaaataaataaaccaatgccaaagaaggcaaaagtgatggcgctaaaatcggtaaaaaagccaccaatttaaagaagcctttaccttttatatttacattggtgagagcaaaagcataaatactggcaagaaatactgtaatgacagtagcagcacaagcaacccacaccgagttaaatacagagctgagtaaagctggacttacaaaatagttataaaaattttcaagaccaacaaaattttgattttcatcaaaaaatgcagtttcaaacaacatcattaaaggagcaataatcgctaaagttaaagcgattgcaacggctgctaaagcaacatttgatcttaatgaatattcagtttttcgacgcggctgtgtttttaaaaccgctgaagcagcttcatttaacatagtgcgtacccttgttcgtcaaagacatggatgagctgattaggcacttttataaacatcagttcttgtaaagatttgaacttgatattttcaatttcaatttgcaaaaggtgttttgcctgctcaattccatcgatatgaatagcgcaaaataaacgacgcttggcacctaaaaattcagtgcttaatactttaactggcaaatacaacgactctttatcactaccaaaatcatcaaccaactcgacagcttcgggtctaaaaccaatgctgtaattttcccctgctttaagtttttgttgctccaaatttagaggaataaaacctaaaacctcgagctgattcggtacagcgcaagtggcttttaaaaaattcatggtgccaataaacttggcaacgaattgggtttgtggcttgtagtaaatattgtgcggcgtatcaatttgctcaatgacaccatgattcatgactaccacacggtcagaaatgcttaatgcttcttcttggtcatgtgtgaccataatcgttggcaaattaagctgtgattgaatcgaacgaatcttttgtcttaagtttagacgtacctgagcatcaagtgcagacaatggttcatcgagcagtaaaatatcaggcttcggtgcaattgcccgagcaagcgcaacacgttgttgctgaccacccgacaattggtttggatattttttagcaatatcaggtaactcaatcagctctaataattgctgaactcgttggctacgctgtgccttatcgcatttctttttgtctaagccaaacgcaatattttcttctacatttaagtttggaaataacgcatagttctgaaacacaatgccacagtgacgcttttcagcacttagcaacgtaatgtctgcgcccttttttatgacttttccataatcaggtttttctagacccgcaattatgcgtagcaatgtggttttaccgcatccagaaggtcccaaaaagctcacgaactcgcccgctttcaggtctaaattaatatgcgttagggcctgaaagtgttggaactttttttgaatatccatcacttctaaaactgaggggccatgttcaggatatttataggtcgttaaggtcgacaataaatgccctgttaactcggccttttgattttgacctagcagcgatgactgcaatgacgaaggtatttgcataatgaggcccttatcccaaagatcacttttcaaaacgctttgaccattcagccaaaatacgttcacgctgctcggccgcccaataaaaatcattttttatgagcatttgaggaagatttttcgggaagtccatagtagtattttcaatgcctttataggccaccattgaaaagttatgggcataggcttcgtttgccgctttgcttaccgaccaatttataaatttttgcgcgctacttaatttcttggttcctttcacaattgctgaggcttccatttcccagcctaaaccttcagttggataaaccacttctaaaggtgcaccttctgcttttaacttaaatgccggataaccaaaagaaacaccaattggaatttcaccttgtgctgccatcttgcaaggttttgaacccgagtgaggatattgtgaaatgtttttatctaaagcctgcatatagtcccatgcctgcttttcgccccaaatctgcatccaagccgtgacatctaaatagcctgtgccactcgaagctgggtttggcatcacaatcaagtttttataaatggggttggttaaatctttccaagtttttggaatcggtaacttacgtttttctaattcgactttattgacacaaattgcagattcccatgcatccatacccgtccacgttggtacaggtttttgacttacaaattctggttttaaattttgaataccttcaggtttaaaaggctcaagcatgtctttcttttccatgaccaacaaactggttaaagccacaccaaaaaccacgtccgcttgtgggtttttctgctctgccaaaagtttggcggtgattacaccagttgaatcacgtacccattttacttttagctctggataagctttgtgtaattcttcttggtattgcttaagttggtcggcttccactgccgtatagactgtaatttcttctgattgttttgatgttgctgatgaacatcccatttgaatagcaactactacacctaaaactgatgcagtaccgagtttaattgtctgttgaacatactgtttcatctgcaaaccatcgaatgcaattatttgatgatggtatttcaacagctttatatgacagtttaattaatctggtttaaaccagattgcatttttatgctcgcgcttcgaaatgtaaatctaaaacatcatgtagccaatattcttggtcaacatcagtaatcacaccttcttcatttctgttgctacggcaaatatataaaccaagcgcgccaacattcacatgcagtgctttggcctgctgttccgataaagctgttggatacagattaatatcagctctggtgatatggcagttatattgatttgccatcagtaaagtaatggattgcttgagatcatgagttaaaaactcgggaaaaagctcggcattcacacgtaaatgttcaaccaaaacaggtcgaccattaatacaacgacgtcgccaaactgaataaatcggatgccctttttcaacttttaaatgtttggcatcccaagaagtagctgtcgttagctcactcgaaatcacttctgtcgaaggttcataaccttgttcaatcacgaactgattaaagtttttagtcgactgcggatgataaataatacgaggagaacgaacataccaaccacggcggtctagtcgataaatcagaccatcagtttccaaagccagtaaagcttcacgtgcagccactcgtgtggtttggaattgttccgaaagtactctttccgaagggagttttgcgtgggcttctaatacgccagattcaatatcatgggcaattgcatcgcgaataggaatatatttaggtatgcgtgcttggtcctgttccatacaaacttagaatttataaataaagaaattaatagcaatatactgaaaaaatatgacaaaagcttttattaatgctgatcttttaagcaaaacaatctcttaagctagtacggcccacttaaatttttctataaaaaaagagcattttcatgccctttttatttttacttagtctttagctggcgtgcttaaaactatcaatttgcttaatttcataaggcaacccgacatagttttcagccaaggttgttttacccgcaattgaacccagtacataactcaactcggcttgtttaatcttatggtcaaactcactttcagtttcaaaacgatgcaataaatgagtcatccaccaagaaaaacgctctgctttccatacgcgttgtaggcatttttcagagtattcatttatcccttgttcggaaccttcggcgtaatattcaatgagtgcgcttgataaataagcaatatcagatgcagcgagatttaagccttttgctcctgttggtggaacaatatgcgcagcatcacctgctaaaaatagttttccaaaacgcattggctcggtcacaaagctacgtaacggcgcgatacttttttcaatagaaggacctgtcactaacttttcacggctttcaggatctaggcggttttttaactcatcccagaacttttcatccgaccagtcttcgacgtgatctgttaaagggacttgtaaataataacggctacgtgtttctgagcgcatactacataaagcaaatccacgttcagactgtacataaatgagttcatcggctacaggtgggacatcggccaataaccctaaccagccaaatggataaactttttcaaaggttttaattttgtcttctggcacactggcacggcagacaccgtggtagccatcacaccctgctataaagtcacactgaatttgaaaggctttaccttggtactcaaactcaacttttggtgcagtgtaaaagtctttcacttgtacattgtgagcttcataatatgaagtgagctgtgctgcttcacgcgcagtcattaaatctttagtgacttcggtctgaccatatacagtcacttgtttaccacctgtgagtgcggctaaatcaacccgatgtaactcaccattggttaagatttcaatgcccgaatgcggtaatcctttttcttttaagttttggtcaacgccggcttgtttcagtaagtcgaccgaaacttgctctaaaattcctgcacgaatccgtgaagccacatattcagcactacgttgctcaacaataatatgatcgatgccagctttatatagaagttgcccaagcaataaccctgctggtccagaaccaataattgcaacctgtgtctttaaaatatccataacttcatccttgtttcatcctgacttttaaattactggctttaagttttgttcactatgtatccaagacgaaaataaccgtttatcatttagtttgtccgaatagcggacagaaacaaccaaaataacaggaatgaaaggatgccttctctcgatgcttttctagagcacccgaactcgcatgagaaaattcgtcaagatgactacattgcaggattagcaaaaggcttggctttattggaagcttttggaacagatcgccagcggcttaatgtcactcaagtggcagaacgaacaggtattagtcgtacagcggcaaggcgttacctaaaaactttaaaatacttaggctatttagaaactgatgaacattacttttggctcactcatcgcgtgctgcgcttttcgagttcttatctaagctctgcccacctgcctaaagttgctcaatcatttttaaatcttttgtgcgcgcagacgtcgctgactttttcaattgtggttctggacgataacgaagtggtgccgattgcccgtagttatttaccacagcaagataatttacgtgtcaacccttatggtatgcatttaggaaaccgactccctgcccatgccacttccacaggtaaagtattgctggcagcactatccgaagaagcacaacatacgtgggtaaaaacttacggtttaaagcgcttaacgccatttaccatagtagatgagtcaaagttttttgaagtgcttaagggtatttcattatcggattattgtctttccaaagaagaacatgagcttggtgtgattgcgattgccgtgcccgtttttaatgcacaaggtcaagccatagcagcgcttaactgcatgtctcaaactaaccgcgtacaagaagattatttggttcagcaaattttgccattgctacgcaacacggcaaatgaacttagaaatgtgatttaaataaacttagaaactcttgttatctattagagatacaagagtttcaactcataattttaaatagcaaattctttaacttgctggcttgccagatctaatgccttgctgcgataagcttgcatgtctaagccttctgcatagataaaatcgacgtcatgaatgcccattagacctaacactgccttgagataaggcgtgactgcctcagtttcttgaccgacatgaataccaccacgactacttaccaccacagcttttaccccttcaaccaaaccttgaggataagtttcggtgtaacggaatgtttgtcttgctcgcgccaccaaatcaaaccagtttttgagctgagtcgggacatttaagttgtacatcggtgcaccaataatgagtaaatcggcactttttaattcagcaattaattcatcagacaaagcaacgatctgctgaatgtcttgatttacattttcagcaccacgaagcgcctgaaagatttctagatctaatacaggcaagttcatttcagctaaattgcgtatggtgatgtcatcttgcacaccttggtcttttcgatgttcaagcattacatcaattaggcgattggtttgtgaaccctcacccataatgctggattttaataccaatattttagccatgaccatctccaattttttgatgaagtcatattaactccacaataaattcaacagtggtgatattatttcttatcattggttccttttaggcaacaatcatgcaacatgaactcagtgcaatttctatatttgtgactgtggttgaagctggtagttttgtaaaagctgccgagcaattgcatttaactcgctcagccataagtaaaaatattgctcggctggaagaacagcttggtgtggctctatttaaaagaactacacgttcactcagcatgactgacgaaggtactttgttttatgagcatagccgccgaacgttaagtgaaatacaaaatgcggcagctttattagaccaaaggaaaattaacgcaacaggccgattaagaatgtctgtgccagtgctgttcgggcaactttttgctgccccgctcatggttaaatttgctcagcaacatgcggacttacagttagaaatttcatttaatgaccgaaatgtagacttgatcgaagaaggttttgatttatgtataagaatcggggcattgcctgacaccactcagctcgttgccaaaccgattggtgagcatcgaatgctactttgtgcctcacctgactatttaaataaaagaggtcccgtagaacatattgaagacttagaccagcacgcgacgattgccgatccgcattttggtcaaatgcagaaatggcgacttcaaaaggaaaatgacgagcctttatttattaaacccaaagcaaaacttcttttaaatgatctgcaagctattaaaaatgcagcacttgctgacgcaggtattgcttggctgcccgattggctcattcaaaatgaattacaggatggtaagctagtacaagtgttagaaaccatgtcgagcactgcttttccgattcatttggtatggcctacactgccttttatgccactcaaaacccgtcttgcaattgattatttggcgcagcatttaccccctgaactgaacaaataagcttaaaaataaaaaagcctcgtccacttgaacaaggcttttttaattattcaaaggcaacgtttattgctcagattcaaactctttaattgcctctttagcaattcgaaagctatctacagcagcaggcacgccacagtaaattgcaacctgcaaaagcacttcacgaattttctctttaggtacaccatttcgaagtgcacctttaacatgtagttttaattcatgcggacgatttaaagctgagatcattgccaagttaattaaactgcgctcaggcttacttaactcttcacgcccccaaacagctccccagcaatattcagtgactaactcttgaagaggtaggttaaattcatcggcattgttgattgaattatttacatattcttcaccaagaacttgtttacggattgctaaacccttttcaaatttttcattactcatatattcaatcctccaaacaaggtgtatttaatttccagataatcttcaataccgtatttagaaccttcacgccccaaaccagactgtttaatgccaccaaaaggcgcaacttcatttgaaataaggcctttattaattccgaccatgccatactcaagctgttcactcattcgccaagcacggcctaaatctttggtataacaatatgcggctaaaccaaattcagttgcatttgccatttcaactgcttgttgctcgttttcaaatttaaatacggctgctagcggaccaaacgtttcttgggttgccacatccatatcagcggtaacatctgcaatcagtgtcggttcaaaaaacaattcacccgctttatgctttttaccaccaaccacaagacgaccatttttatctaatgcatcttgaatatgagcttcaacttttttcaccgcattggcattaattaatggcccaatgtcatgcccagcttctaatccattaccaatattaaaattttgaattttttggcttaaggcagcaataaatttttcataaatacctgcctgtactaagaatcgattgacgcacacacaggtttgccctgcatttctaaatttagcaatgagcgctccctcaattgctgcttctaaatcggcatcatcaaatacaatgaacggcgcattgccacccaactctaaggaaactttttttaaggtttttgctgaacgctcaagcagcattttgccaactggtgttgaaccggtaaaagtaaacttgcgtacgacatcactttcaaaaatcgcatcaccaatatgaactgcatcacctgtaatcacactaaaaatttcagcaggcacgcccgcttgcacagctaagtccactaaagccaaagcagtaaaaggcgtttctggtgctggttttacaatgcaaggacaacctgccgccaaggctggagcaaccttacgcgtaatcatggcagcgggaaaattccacggcgtaatagctgcaacgacgccaataggctgtttatttacaacaatacgagcatctggatatgggcttggaataatatctccatacactcgttttgcttcttcggcaaaccattcaataaaactggcagcatataaaatttcacccttggcttcagctaagggctttccttgctcactcgttaaaataaaagccaattcatccgcatttgaaatgattaaatcgaaccatttttttaaaataattgatcgatcttttgctgttttatttttccatagcggccaagcttctttggcagcttcaatggcacgctcggcttcagccttgcccatattcgggacagtaccaataatctctaatgtcgctggatttaaaatttcggatgtttgttgatggtctgcatcgcaccactttccagcaacaaaagcttgctgacgaaataaagcgagttcattaagctgcatgatcattatcctattaagatcttctgcattgatagtcgagcgatacataaattaaatagctcaccatcaactttgtattatggcataccaaaaattaatttaaaaaaattttcggtatgcccgaatgtttaaatgtatttagaaataataaaaaagcgttaagttaagcaacttattccactggttatcgtctccttttgccaatgaatcttgagtcccaccaatgaatgggtcatttttactcatgatgtattcagccaccaaagatagctgtttatggtcaatagacacaccaataatattacgaatcgaatctttcatactgtcctgatctttatcgtactgactgtacataaagtacggcgtaattttcccgatctgcttaacatttttaaaagtgtagcccacatctgcagtatagaatgttcctttgttcgcgacataatattcactgtcgtaagaacccatgagtgactgattagggttaagctggtcctgattagttacgtcatttttaccaccagtaagggtcacatttaaattgccataattggctttaccaaaaagtgcccatgcatgacggcgcccatcactcgaagcggctttattttcaatatcggatgtccaataggagccaccgagttgtgtggttaaaccattaattccaagatttatatcttgagtcactcggcctacccacatattcttttcttgcaaatcggttttattcggaacgtctgaactcacatagtttgcagtgtagcgacctgaatcttgggtagagcctgtgtaacttccaccatctaccgcaaaataccccacatcaaacttggttgctgtcggcaattcaaaatgataattcaaaccaagattatgaacatcttctaaacctgcggttgtgctcatacttccatataggctattaccccaaaaacgtcccggtccaaatggaatcggctgaacacctgccaccacttgatctgttttatttaatttgtaccctacataaccatcaaccaacgtagaaaaatcacatagacgatcatattgatagcaccgatattccgcatgaccaaataacggcccatgctcgtagtccagttttaactgcgcagcatcaaaacgaattttttgatcagaagcagactctccatagtgtttatcttgatagttagcgcgaacatagccggatacggtgagcttgccgtattcatcatcggtgtttccaaaacttatacctgcgtaactcggatagattacagccatcaatgctgtgcttagagccacttgtaaatagctttttttcattgtgggattcctttcactacaatgcttattgaggtaattttgcgtttaatgcaggtgcagaacatttaatctttcctagattaaagacgtaatacaccaccagactcaccaccaatccaataacccatgaaatatccgcatccggaattacatcggccagtgcacctgtgaaaaacgcattttttaagaacggaatttgtaccgcaatcccaatgaaataagccgtaagcgcttttgcattaaatttgccgtaaataccaccatcacgtgcaaagatcgattgaatgtcataagactttttattcacgacatagaaatctaataaattaatagacacccacggcaccaaaataaataacaaggcaaaaatcacattcaagaagaaactaataaagttacttgatgcccaaagcgccgttaaagtcgctagaactaatacaatgattgataacacgactcggatatttcggcttggcatccactgccctgcaaaagtctgaatagaggtaatacaagaaagaaccgcaccgtagaggttcatggcattatgaccaatgatattgcataagaacaaaatcataaggacatagccgaacaacccagtgcctgactttaccgcttccatggcatctgtggttgagccaatactaaccgcgatcgtaccaaatgccatcgcaaaaatggttcctaacgatgcgcctaaataggtaaagataaatggcttataaataccaatcgacttcggtaaatatcgtgaatagtctgaggtataaggcgagaaactaatttgccataccgcacacaaaccaaacatggcaaaccagcctttcatattgaaagagcctttggcaagtacatctgcattaatatgcggcaccataatcatgaggccgatgagcaacgaaccacccataaaccaagttccaattttattgaacttatgaataaagtgataaccaatcacgcctattgtggttgctgcaattgcaccaatcacggtcgcagtcggcacaggaatagcaggaacaacggtatgaagggttttgcctgacaaaataatgttagagatgaaaaaacctaaataaatgagggtagtaaacagtacaaccagcaatgccccataacgcccgaactgcgcacggctctgaatcatttgaggaatgccgacctgtgggccttgtgcagaggttaaagctaaaatcgctgcaccaaaaaaatgtccgcagcagatcgcaagcaatgcacttacaatattgaggttaaacgttaaaattgacattgcacccgtaatcacggcaagcggtgcaatattggtacaaaaccataatgtgaatagatcgcgaactttcccattacgttcagagggagcaacataatcaatagaatgactttcgatagcgaaagcattattgctattttcgttttggctcatatccttaatctctctttgaggaattcatttcctcaacatcaaaaaatctgcccagccaaagtcatttcaatatgactcggcttcatctttttatttccttttacaaacagctcatacttctgtttgtgttgttttagccaagaaaaaggtaaagccagtccgatcaatacttgattaagcatcgatacatctagttttacgttttcaactatttaaagctttaggcgattgctgagtttgactgattcattttttcatccttgaaattaaaatcccgatatattttcatgcctcaagtcatgatttatctcatgacaaatgggtcatcaattggctcatctgaggtacgtaaccaaactgttttggtggtggtgtaatctaaaacagcatttgcgccaccttcccgcccatgtcccgaaagcccatgtccaccaaaaggcgcaagtggagaaaccgcgcggtaagtatttaaccaaacaattcccgacccaatgactttggtcatacggtgagcacggcttaaattggtggtaaaaacgcctgctgccagcccgtaaggcgtactattggctttttgcacagcttccgcttcatctttgaaactatctaccgataacaccggaccaaataattccgtggtaatgcaatctgcttgaggtgcatcggtgcaatctaaaatggtcggtggatagtaataccctgctcgctcaatgcttttaccaccagtaagaagttttgcaccttgctggattgagcttgcaatgacttgctcaattttttggcgttggcgtaaggtacaaagtggtccaaactcggttgccatctcatgaggtaaaccaatttttatggtttgtacacgctcaaccaaacgctgaacaaattcatctttaatgctttcttcaaccagtaaacgtgaacctgctacacaactctgccctgtggccgcaaaaatagcagcgacctgagcatttaccgcactttgaatatctgcatcagcaaatacaataaatggtgatttgccacctaattcgagtgaaacttttgcaagattttcagccgagttacgcacaatgtgccttgccgtttctggaccacctgtaaacgcaacatgagcaacgtccggatgactactcagcacggcgccacattcaggtccgaaaccggtaatcacgttgaccactccagccggaaaacccgcttcatggactaatttggcaaaggctaacaatggtccagggccgtcttcagaagcttttagcacgaccgtacaacctgctgctaaagctggccctaccttcactgccgataaaaataactgactgttccaaggaacaattgcagcaaccacacctactggttcacgaacaatccatgcttgcatgtctgccttatcaatcggtagaaaactaccctctaatttgtcggcaatacctgcatagtagcgataatattcagcgacataggcaatctggctcgatgtttcacgaataatcttgcccgtatcactggtttcaatttgggcaagttgcggtgcagctttttcaattaaatcagccaacttatagagcaatttaccgcgctgggaggccgttaaacctgcccactccggtgcttttaacgcctgagatgccgcttgaactgctcggttgacttcatcggttcgagcttccggcatgtgtgcccaaacttcacctgttgcaggattaatactttcaaacgtcgctgcaccagattcaaactgaccattaatataaagctgaaaatctgctgtcatgatattcgcctctatgcaaatgccggcataacttcattgatcatacgttctaatgatgcttttttacgctcaaagctcatgcccgtatcaatccagaaagaatattcgttatagcccattgcttcataagcttttaagcggtcaatgacttcttgggcttgtccaatcacgttatttttgcgcatcgcctcaggtgtataaaaaggatgtgcagcaatttcttcagggcttaaaggtgcaattaaaccttgtttaatttcacgctcatttttaaaccaagcgccgaagtagttatagaaggtattgatttcatctgctgccagttgagcatcttcttcactatctgccacataggtatggcggagcaacataatttccggacgcggtacatcactgaacttttcacaagctgcattgaaatgtcccatgagcttttcaacttcttcgtcacctaaatgtaacggcgttacctgtatattacagccattttgcacagcaaattcgtggctatttggatcacggacagcaacccaaattggtggatgcggttgttgaagcggttgaggcgccgaagtcgtttttggaaactgccaaaattccccgttatgctcataatcgcctttccaaaggtttttaattgcgggaatcatttcacgtaaacgctgacctgcactccatgcatccatgcccggaaccatacgttcatattcaaacgaataagcaccacgagcaataccaatatctaaacggccattggtaataatgtcggtcattgcagcttcacctgcaagtttaatcggatgccagaatggcgctaccaccgtacctgtacctaaacgaacatttttggttttattcgctaaatcgaccagatttaaaaatgggttcggtgcaatggtaaagttcatggcatggtgttcgcctgtccaaaccgcatgcataccgccacggtctgcaatttgacaaagctcaatcatttcatcataaagctgcttctgggtttgctgatcagaaacacgttccatatgcacaaataatgaaaaacgcatgattaaacttcctctttaacgatttgacgaactgtacctgttgtctgatttccgtaataaacaccataagttttcaaatggttttctttgcgatagcgcatcagcatactttctaaagcactgtctacaaactcaagtttctcaagatcatttaaatcgacaaactgacctttagtggcttgagctacgggtgtgttgcataaaaatgaaatatattgctgctggttttcaacgttttcatatacagagtaaatgaagttggcagaagcatctggctgatattgtgcaaagattttctcgagcgctttatctgcaccgtctttatctaccatgacatgcggaatagtccatttatgatcggcagtttcttcaagtaaaatggtattttcatgtccaataatggcactcatcaccactttagggccagagatcacctcggcagaaagtttggctggtgtgaaatatccaccacgataataaccaagacctgcaaaaccggtcgaagcaaaatcttcaactttaccaattaaaatcgcatggtcaccagcatcgacaacttggtaggtagtacagtcaaaccatgcactgacatgatcgatcagcgggttctggcaagcgctttttgaccatgaaagatttgcaaaacggtcttcgcttggacgagcaaaagtatttgaaacatccttttgctcttctgccaaaatattgattgcaaaatgagtggtatttgcaaagttatgataattgcttgatgtcttggcaatactcactagaagtaaagctgggtccaaagacaccgaagcaaaagagttcgctgtaaagccaagtggcgttccatcttctttacaggttgtgaccaccgtaacgcctgtcataaatgacccgaaagcatcacgtagttcacgcattttattaatcgtatccatttcactcattgttatattccttcagcaatgtgtggcaaattaaacgctggtttccaaccacgcttgcattgcattattcactttgtcaggtgcagttaagttcaccatgtgacgttcattttcaatgacaattgcagtgccatgctttgcctgttttgccatttgtaatgccatttccgctgttgaattcggatcatccgttccggtcaacaccaaagcaggacaagtgatctttgaccagtcatctgcataggtttcatcgccttgtgcaaacgcagaatacgcagtggtataaccagacaagtcgacattttcgagccaagttttcactttggcagcagctatacgctcgacttcactttcaccaaaccagcgttgtagcggagtttcaacatcaatacggcctgtttttaactcttcagctctttggatgactgcatgacgtgcctgtggtgtccgtttatacacaccattgagtacagccatccgtttaactaaatcaggacgggtaacactgacgcctgtagtaattagcgagcccattgaatgccctgctaaatttaccgggcctaaatttaaggctgtaataaattcgatggtccattcaacaaaatcttgtaattttgcgtctgccggtaatttggtactttgaccatgtcccggcatatctactgaaatcacatgataatgtttagaaaaatattcaatttgtggataccatgccgcagcttgcattcccactccatggatcagaaccagaggctctccttcgccttgctcaaaatagtgagcaatacggttatttgacagctgcagggtttttgacatcatgacctaactcttccaaatctttataacgatcaccaatacgatgatgtggtcgaccacctgtcgctgcaccaatcacaacaaccagttcgtcagcagcaggtgcatctggaattgcaaattgcaatgttaagtaatgagaacggcggccttcgtcatttttatccatcattggaattaaaatcggtgcatttgctgggccacgggtattgttaaatgccaaataagacttcgcgccaacagcactacggtaagtattaccaaaatgtaaggtgtgaattaaagctgatgcatgctcaagttcaccatttaagcccaccactgcacttttaccaaaagcttcaacggcttcgcccgaaccgacttcatcaagaataagcttggttaaatgctcgcttaagatcggcgcaatgcgacgaatttccggtgttaggttttctacataaccttgccctgcccacggatttttaattaccgctgcggctgccaccatttttaaaggcttagctgcttctttgccgccatctacataagtggtttctacatgaagtacagttttacgtatgagttccattgctcttccttgcaagtaaattatcttgtcattcgtattatggtataccataatacatactgaaaaaaaagcaagagtttgctatgctaatttttattgaaatacatgtaatgaaactcaacatgttaaaaaacaggaaaatttaattacctatgaatcttaaaattgagaacccgcccgtaactttacgagagctgtgtttagataaagtgcgtaatgccattattacgggctatttcccttcaggaaaaagattggttgaaagaacgttatgtgaagaacttggcgtaagccgttctgtagttcgcgaagtgattcgttatttggaagcagaaggtttagtcgagattctgccaaataaaggccctattgtttcgctacttaactgggacatcgcttcacaaatttatgaaattcgtcttttgttagagcaaagtgctgtggttgactgcactaaaaatctagatgaaaaaactgctgaaaaattaaaacttctattagaagatcttaaagctgcgtttgccgccgatgacatcaatctcattattgcgacctctactcggctttatgaaactatttttactactgccaatcaccatattgcttgggaagtggttcaacgtttaaacggtcgaattagccgtcttcgtgccatgaccatgaaatcgacaaagcgtgaaatttcaggttatcaacgtattaaaaatatgtgtgaggccatttatcttcacaaagaccctgaaaaggcaaaacaagctgttgctgaacatattgctgaagctgctgctgtcgcaaaaaatattttagatgcgtgaaatcacaaattttaggaaaaggtaaatagacctttattgaataagttatagggaaatacgatatgtctgcgtactggattgctcatgtcaccattcatgatatggaacaatataaacaatatatggccactgctccgcaagcttttcaaaagtacggcgccaagtttcttgcgcgtggcggtgcctcggaagtcttagaaggacaagagtttgaacgtcacgtggtgattgagtttccagatatggaaactgcacgtgaatgttatttttcacctgaatatcagcttgccaaaagtaaacgccaaggctgctgtgatgtcatggtgagttttgttgaagggatctaaattgctgaattgatttctcaacttgagaaatcaattctattttaagttgttatatcagcgagcttatttatatgttttaaataaaccttataaaaacctcaccattaactcatcgttcaatcgaaaaatttcaagcaaactaatcagcttcttcttttttagaagaaggccccaaagccatactcgaaaatacgccatcgcgataaatccatgcatgtaataatgcagcagatagatgaccaataacgacagcaaataataaccaagccaaaattccgtgtagagtacggaaccaagcgtaaagcgtagagttggttggtgctataggtggaagatcccaacccggaaataaagtgacaggccaattacctgccgatagcgttgcccatccgagcaatggcaaactaaacatcaaaatataaagtagccaatgtgatgcatgagcaagaaacgcttgccagcgtggtacagacggcggcaaaggtggaattggataacagagtcgatttattaatcttatgatgaccaatagtaagattgcgattcctaaaggacggtgaatatcaattaaccacggacgccaagtcattgaggtggtcattcctaccccaataaatagcatagccagaattgctgccgccataagccaatgcagtattcgcgcagtcaaattaaaatgacgtggagcattatcgttagatttattttgcattgttcatctctcctatttgcccacggcatccgttgctttgccaaatccaatttcacgtaatcgagcattataagactgtgaatagatcgccgctcgtgctgcgagtactgggtcatctgataactcaattccgggtggcaccaaagttgggtcaaagttaatatcacgacaagcgccatttacctgatcagttacatttttgacttctaatgttccggctataacttctttacggtcttttggccaaggctgagatgggtcattcactgggtctcctggctcggcaagttgcaatactaagtcccaatagagcggcccttcagccaaacgttttttgatgtctttaaataagaaatcatgatcagcttgatcacgttgttctttcgtcagactaataaattttgaatgaggacgcatagaccaacggactggctgttcttgtccattggctgcccgcaatataaaggcatttacgacataaaattctgcaccgctgaaactaccagttaatggcatcttggccttttgctcaatagacttacgcgcttcgggatattcttttaaaaacgcctcaacaagggctggatcaggtttcccagtagacggaactggtttaaatgctttttgctgcgccaaaaaaccttcagcatttcgagtcgggaaataaggaaagttgtttaatttcatgcgccactgcgaatgatcggctggagaaagtaataaagccatactcactgttgcggtagaattatctgccgcatgcgggttaccgcttccaatagaaaatcggccaattgctggtatatcagacttggcaaatacagtggctttagagagtgctgctgccgcaccattactatggtaagtgccatcaaaacaaatacctttaccatgtgctcgtcgatatccgggatcaaagttctttaatgtgtcacccaaaaaagttttggatgttgttcgatgtccaaatagaccagcggtccaagcaaatgccaatactaaagcgcctgcgattacagcaatacccacgaatcgcagccagtacttctttagcgttttaaaattcaaattattcattcttcatcctgtgtaaattatatagctgcatttataaagaaaagttttatcctataaaatacgcaggacttcttatcctgtcgtccttttgaaccaagaaaataatttacgcttaagcttatttttttataggtagtagtaaaacagggtcttcaatatcgtaaccagtttcttctggaacccccaaatatttaacgataaccaacctcttattttgtttaggcacactataattttgggaaatttttattgctttgctgtaatgaaccgcaacatgggtcttactttgtaaagacggcgattttacaacatattctgttttatattgcgtgatctttcctgaaggatcaaaccaagacgatatctgattctgatgagtttttaatgtttgaatttttacagtcttactattacttacgatcaaaggagttaaattccttttaattttattaagtgccttattaaacgctgtactatcttgatcataatcaatcttatgtgtttttggattgatatagagagatttaacttcaatcagtttatcaggcgatttactatttaatagataataatatagttgtggtaggcgtcctcggccatcttcataatgtcttaatacataaagtttcttctctttttgctgatagcccaatacttcaattttttgtccaccacccactgtcgcataggtatgtgcggataaggtaagaatcgtgctaaaagttaaaaattttagaaatttcattagttcatatccttgtgatctgataactatattgtataaataccaatcagtttaaaatgacacttgagtaagtgttacttgctgtttttatattcttttgtacacaagcagcctttctaaggaggctttatttattatttctctcccccttcaaaacaactcgtctagcttttacatataagccgtcatagaagaacaggctagcacttgctagcatcgacatgagtaaacatacatggactaaaatttctaacaaaagagtttaaaaaataatccaacatcttttcccgctcgattgccccatctgagcttaaaagctgaatgattgtgccctccaccatatatacaaatagcttggcatcggtaaaagaagcatccgcgtttagcactctaagctgactataaatttcatttttgagccatgttctatagcgcattgcagattgataagcgttgggataactatttttaatctcaaaaatagctttaaataataagtaatacggcccttctaaatcggtatgtaaataataaagcttcttaagtttatctattgcgggagtgcttaagtcatactcgaccattgcgaccacttgctcttggagcttttctttttgcaccataaggcagatttcaataagcctttctttagagtgaaagtaattataaaaagtcgctttcgtaatttctgattctttcactattctgtcgacgccaataaggtgaaatccacggtgatgaaacagatcaattgctttatttacaacatataaggtacgtgttgggagagctaaatttggcatagttttaccgttataaaaatttttgttgtatgtagagataaaaaagcctgtgccctttttgggagaaaaaaaggcacagcaaagccgtaaagactgtgcttggcacatctcaagttttgttgttgctgagttttaagtaaaaatgactttaagcctgaaaaccttaaggcgttcaagctgttttattttttaagttgtgtcgttatagcttttggcattgagagccaagaaataatggatgtgcaaagccaactcctttttattgggagttctgccgacatgaatagaaattatggtggcagaacgagaaagggttcgcggactggtttcgactccagcacacccgaaggtgtccctctcccgtcctaccgctacgggaggagactgggagtttacacataagactattcctcagaagaaataatcctgatgtggtcgaaaaaatcggtccgcgacgaccggctggcaatgtggccagcaggcaaagaatagtgcccaacccttttacagtcaagcacgtaaaatgccatttgttttaaattaaatcattagaaaagtaaggctaaataatgggtgggttattgttaagtgggggttgtaaactagaaataggatcaccaataaatattgatgggaagtcatgcctaaataaaatacagcaatatttagctacccccctctttcaaatgatcagcattatatctctcaaattaaatagatatttaaattaattcttaatatcatttagaagttatcggaatactttaactgctttatcgaagcataaaaatataaatttttaaatatgactaattagaaaaagctctatattgatacaacaataaaaatgttatattgtcaggcaaccaaacggtcagcactaactcattaatgctctcactgttgtaaacatttggttcgggcgaaaacacagcaatgtgcttgtcaactgaaccatgacgagggtctggctagtcttatcaccgatgagatgagctatgtccatgttgataacagtccttttgctatctttacttggaaggtacttggtattttcaagatggagggcgtgatggcgcaggcggtttggcgatataatatctatcgaaaaattcaatggctaattcagtttgccgtgataattacaccagtaattattcatacaaatcaattagttatgtgtgttttcttggagattattgtattgttgtttgatatattattatggtataatggaagtagtatgtcgcaagaaaagatggcaataaattgctctcactgttgtaaacatttggttcgggcgaaaacacagcaatgtgcttgtcaactgaaccatgacgagggtctggctagtcttatcaccgatgagatgagctatgtccatgttgataactgtgcccctttttaaccattatgagatagcttcacaagtacgtaatggaacagaaggtttttattaaaaatgttattttatgattttttaaaagaaggttttgatttttacttccaagagtttaaaaagaaaaatataaataattacgataaaaaatatcataccaattatatttcaattaaagagtttgaaaaagatattaaagttaattcagaaaatattttcaattctataaaaaataacaattataaatttcaatctctataccctatagttattgaaaataaaaaggaattaaacaaaaagccacgtttaatttgcataccgacagttagagatcgcctaatacagatgatcttaatttattatatttcaatacatttaaaaaatgaattagctgttcttaaatcccaagatttttctgtttctggtgtaggaattttaaaagctcgtcaaaaagcaaaggatttgagaaatactaaaccctatgtattaaagacagatatatcttctttttttgacaatattgatcgagcaaaattattaaatgagataaaggatgtaatgccaccagatatactttatttattccagtcaattatttattgtgatccaagcattccttatgaatataataaagattataaaaaactaatttactctaaattaaggaaaggcgtaaggcaaggtatgcctatttctccactccttgcttctttctatttaaatgattttgatgaatggttaattaagaagaaatacaagcatgtacgttatgctgatgacctaattttttttcttgactcagaaaagcaatgtaaagaagtctatagagaagtttctcaagagttacttaaattaaatttaactttacccacacttgaagaaaatacaaagactcaaattatttctcctaaagaaacagtcaattttttaggtttagatctgcgttatgaaaatgaaaaatataattggtatattccaccccatgtaattgaaaatgtaaaatataatttattacatctaactaatattcaaaataatctcaaaatgaaattaaatttctccaaaactataagtcgtatggaacaaattatttctggttatcaacattgttatagtgatgccgattctttaaacttaaaagatttcaataaaatactaattttagaaaagcaaaaagctattaatttactttttaaaaatttaggaattgatattagcacagtacattcacaatatttaaaatatttattagacaattaaatatttaattgtctaatatttttaaataccttatatttaatttatatacacacattacaatttcctacctattttaattaagcttgtagccaaattagaagggggtgatttactaaaatgtatatgaatatgtggaaattcaattttttctttattaaaacagcattctttgaatatttttttagattctttacatggacacatatcattttcgtcaacagtattaaattcagaacgatcaattaattttttggttttaaatggcttccaataatcaaaaggagattgtaatctttctgatataaaatcaactgcgctataatcataatctagcattggtatacatgatttttggacaggattttttaccatagaaatttctttcagctcacagcccccatctgctacatgcacacacaatttaccattatataatttaccttttttatgaatacatttattccttggccgaataacatgcccacatattgaacatgtatactgctttattgttgcaccaatactaaagaaaattttgtaaggaaataacgattgccaactctcaacaatctctttgtagaaatccaacttatatttttttataaaatcttcgtctacatttttctctaggaaagaaatgtctatttctatcctttctaatagaacccaagcttcataatgcttcttatctttcaataaaaagaaagttttaatatatctatctttaattataagtatagttttcaacttccacaaaaagttagataaatcttcatctccttgttcctgaatattttctaacagtttactaacttcttctaaagcaactttatagtgactttcattagtagaattgcttagtaataaagtatctatattatttagcatgtctattaacttcattgtctctactcaactcattaactttatctagaacactattaatatgctcagctttaccacgataggctaccttgatattcttatcgttgttcttttcaattataatattaacctctatttcatcatcacttttagcctgcaattcatttgaaatataatcactcataacatttgtgaatattggtacagctacttgagctactaaaaaaacacctaaccaatgtgcttttgaatgtaatgctaactcttgatactcctcatcaaaagcaaaaagttcaacttcattttcacctaattcttcttgtaaataagaaaaaatatcaattgtaccagtatgaaatgcatcattctgtctaacactaggaagaattaatacactaacatccctatttaaaattaaaggtttttcatttttcaaagttgaaaagtttaaatctgtttcttccaccttaagcaattgatctgaaatcatttattcccacctaaaaatttaaattttatctgaaactttctttcaattatttctatttaatataaaccaaagctaagtaagataaccatacttagctttggaaaataaccagcttattcaactttattattatcttaatgtatttttgctctggatctaacaatcaaataactttatatcacggcgcaagcctgtaacacgtagatgtaaacaaagcgactctattattcaaaccgtctgttatcaacacttcataatgcgcaaattttttactacttccgaccttggttgccgttgcaaataacaccctatctttcgcaccgctcatatagcgaatatcagcttgtaggccagtatatggcgcatcccctgcattacacgccatcgcaaaagcgatatcggctaaagaaaatatgactccaccatgtacaccgcccaaggcattcatgtgttcgtcttttacattaagcttgcaacgcgcttcatcaaaactgcgatgcagtacttctacacccaatagctctgcgaattgatcaaccgctgtggtttcatttttttgcacaaacgtctccctactcgtgcgagtattccttaagtgttataaacctatgtgtattgaaatcgacttgttaagagccgttaaacgctatcttgtttaatctgatagtttgaagaactaaagtccttataggtcaggcggtcatccaactctgaagttagaggctgaacttcttgcattgagtttaagcagcgctgtgcaagttcaatgtattcttgcgtgcctctggttttccactttttttcttgttctgataaatcacgtgcaaccttggcagggctacccattgccagtacatttgccggaattatatctttggttttgaccaagctatttgcaccaataatagtgttttcaccaatttcggcatagtccaaaattacgctgttcatgccaaccaaaacatttttaccaatgcggcagccatgcaaagttgtgccatgcccaatgtgccccatttcctcaactaaagttacgctttgcggaaaaccatgtacggtgcagctatcttgtatattggcattttgcttaatatgaatacgaccaaaatcggcacgcaatgaagcaaatggtcctacatatacgcccgcttcaataatcacatcaccaattaaaacagcggttgggtgtacaaaagcgtctgggctaacgactggaataacaccgtcaatactataacaaggcatgatttaacctctcatttgtcgccaccaaacctccgaaacggcgccaataatgtgctgtggcatttggcattggtccttctgctgttgcggcaacagacaagaagtattcatccgcaggttcaaatacttttttataaatattcattgataacgttcgcgcactaatcgcaggccagtcagttggcaacaactcaagcggtaatgcagggtctttcaataaaatccgtcgataataatgaatcagcaaagttcgaatttgaaaggcctgaacaggttcgagttgttcgttttcctgcatcagcaacacgccaatttctctaaaaatatcgagaaactgtagatatctttggcgtaattcatcgatgggccagttggttctgagcatacgtccaatggtatcgaccgagttattaaagagctgcaacgtttcggctttaaacaccaccacttgctcactcatatttaagtcaaccaacaagcgttgcagctcaatacggttacaacccggatacgccattaggtttgtagaaatattggcaaatcctaaccattcgagttctttctttaacaacgctttattttcagtatcgaggctagacatcagaataagatcccaataatggtcccactctttcatctggtcgttataaatgcgttgctcggcctgcaaataagtcgaacggctcgaatcggtaattcgataaaaactggttctgccgattttatctgaacataaccaatcatttttaactaaacgaaaaacagaggttcttacagcacggtcattaaaaccaaacagctctaataactgaatcaggcttgcaagactgatatttccaccccgatgaagtactgaatctccaaaaattgtcgaaataagcgaagttccacttaaggtttcattctttacaacagaatcaattatttgctgtatttttgcactcatactcatgtcttggcgtttagtttcagggtatagattctataccctgaatgatcttgatgttaagcaatctgacgcatatcgattacccgctttgccttaccttccgaacgaggtaaggtcgcttctgtcacaacttctacagtaacgctaatcccaatcatggttttaatgcgtttcatcaactcctgagcaagttgattggcctgtatagtacagttatgacacatctctgtacgaatatgcaaagtatccatatggccttttttagtcaccaaaatttcataatttggaactaaatgtggaacttgcaaaatttgctcttcaatttgggtcgggaaaacgttcacaccgcgaataatcagcatgtcgtcgctacggcccacaattttatccatcttacgcattgccagattttcacccggtagtaagcgggtcaaatcacgagtacggtaacgaataatcggcaagccttctttggtaatggtggtaaagactagctcgccaagttcaccatctttacaaacttcacctgtttcagggttaataatttctgggtagaaatgatcttcccaaatggttagcccttcgccttcacctaagcactgcatcgcaacacccggacccatcacctcagacaaaccataaatatcgagtgctttaatattgagacgttcttcaatttcacggcgcagttcgttggtccacggctcggcaccaaaaataccgacttttaaagacgtattacgtgcagtaccaaattgttgttcgagtttttcaataatactcacgcaatatgatggcgtaaccataattgcagtcggtttaaagtcttgaataagctgaacttgcttttcagtttgtccgccagacattggaataaccgttgcacctaagcgctcggcaccataatgtgcacctagaccacctgtaaatagtccatagccataagccacctgaaccatatctttcgcggttaaacccgccatgcgtaagcaacgcgcaacaatgtccgaccaagtattaatatctttttgggtataacccaccacagtcggtttacccgttgtaccagatgatgcatgtaaacgcacaatttgctcttgcggtacggcaaacataccaaacggatagttgtctcttaaatcctgtttggtggtaaatggaaacttcgccagatcgtctaaagttacgaagtcgtcaggatgcacacccgcttcatcgaactttttcttatagaccggactattttcatatacaaaagtcagggtttgttttaaccgtttagtttgcagctctcgaagctctgcaagtgttaattgctcaacattatccattgtaaggctgtccatcgcctctctcctcattatgtaattttaaaaaccgtctaagttaatttaagttttccaaaatcagtgcgacaccttgtccaacacctacacacatcgtgcaaagtgcatagcgtccacctcgtttttttagctcacgtgttgcggtaatcactaaacgtgtaccactcataccgagcggatgtccgagtgcaatcgcaccgccatttgggttaacgcgttcatcgtcatcttttagaccaagttcacgcatacaagccaaagattgggctgcgaatgcttcattcagctcaatcacatccatctgatctagcgttaaacctgtttgctttaaaattttctgcacagccggaacaggacctatacccatatatttgggttcaacccctgcacttgcaatgccaattacacgtgctaatggttttaaaccatgtgtatctgcaaattcacggttggtaattaacacacatgcagcgccgtcatttacaccagaggcatttccggcagtcaccgaaccaccttcttttttaaacggcgcttttagtttagcgagtgcttcaagtgtcgtttcacgcggatgttcgtctcgattaacaacgttcacgtttttcttacggtctgtaatctcgacaggcaaaatctcatcgttaaagaaaccgttttgttgtgccgcagcggttttttgttggctacgcaatgcaaacgcatcttggtcttcacgactaatctgatatttttcagctacattttcggctgtttcgggcatgctgtcggtgccgtattgcgctttaagttgcttatttacaaagcgccagccaatggtggtgtcataaatttcaggtgtacggctaaacgcttcggtcggtttagcttgtacaaatggcgcacggctcatcgactcaacaccacctgccaacacaaattgtgcttcaccagctttaattgagcgtgctgcaaggcctactgcatctaaacccgaagcgcataagcgattgacggtcatggctggcactgtatcaggtaagcctgctaacagtgttgccatacgtgcaacgttacggttgtcttcacctgcttggttagcacatcccaaaaatacttcgtctaccgtattccacggtaggttcgggtgtttatcttttaaatatttgatgggtaatgcagctaaatcatctgcacgtacagcacttagggcacctgcatatcgtccaattggggtacgaataaaatcgcaaattaaaacgtcttccatgttgactcctgattatgcaaattcggtcatatcacgtgaatattgagtagcaatgttttgggttttcgctacatattgcttgaggtagatactcgcgcgatatttttcctctccatacagtgcatataagttatttaaggtttggagcacataagcgccacccatttgtgtcaaccactggtaagggcctttaggataattcactccatatttcatggcattatcaatatcttccagactcgcaactccatgtaaacttgcttcgcaggcttcattaatgagtaaagcgatggtacgtaaggttaacagtgccggatggtctttaatccacatcacgctcataccaaactgtgcaaagtaagcctcaactttagccagatcatttgtttcacaaagctcgttatgactgagtactaaagcctccgcctgctcaaaatcatggtgccaatccattaaaaccactttacggcttaggtaatgaatattggctgactcaccttggcttaaacgtaagtcgatatcatcaatttgaaggatattgtcatcactcgcagatccgctttttaaacctaaacgcgttaaaaaagcaggtagctgagaccaagtcccttttagctgaatatgggcatcgactggtttggcaaccacagcttgaggctgaaatgtctggtattgatttttttcgttataggtataaaagccttgttttgacttacgcccccaagcacctgcatcgaccaattctttttgaacgaggcttggacgatagcgtggctcgtaaaagaactcttggtaaacgctttgggttaccgaaaagttaacatcttgcccaatcaggtcagtaagttcacaaggccccatcgcaaaaccgccacattgctttaaggcataatctagctggtcatagctggtgacttgttcttgcagtgctctaaagccttccgcataaaacggccgtgcaattcggttaacaataaaaccgggagtcgacttggtgagtacaggaattttcttccaattcagcatcaagttttttaaagccaaacataagctgtttggggtttttaagccttgtacaatttcaaccagtttcatgactggtgcagggttaaaaaagtgtaaacccactacccgctcagggtgagtaatgcccgccgaaattgcagtcactgaaattgaagatgtattgcttgcaaaaatggtttgcgcactacaaatttcagcaagttgcttaaataaagactgtttaacttcttttttctcaacgactgcttcaatcaccaagtcagcatcacgcagcgcttcaatttgattgaccactgttaaacgcgctaaggcttcatcagcttgctgctctgtgagcttgctcttttcaaccagctttttaaacgtctgccctaaaccttgaacggcttgttgcgctttttgagcatctagatcatataaaacggtcgtgtgtccattaacgatggctaactgggcaatgccgatgcccatagtgccagaaccaatgacggcaattcgggcacgagataagtctaaatctgtcatgcttagcgccctttaaaatttggttcacgtttattcataaaggcttgtacaccttcacgataatcttcggaacggcctgcaatgcgttgtaaatctcgttctaacagcatttgctcatcaaaagtgttattgcttgattgatgaatggcttttttaatgagagatagaccaaatgtaggctgtttcgctaaacgttcagcgagttcagtcacttttgttttaagctcggcgtcttcaaccacatcccaaatcatgccccattcttttgcagtttctgcggggagcttgtcacctaacaacgtcaaacccatcgcacgcgcatggcctacagcacgtggtaaaaaccatgtacccgccgagtctggaaccaaacctaagcggcaaaatgcttgtacgaagtttgccgatttagctgctatcaccaaatcacatgccaatgcaatatttgcccctgcacctgctgccacgccatttaccgcgcaaatgacaggctttggcatatttacaatcgttttaatgagcggattatagtaagtttcaatggaatatcctaaatctggagcttcagcatttgggtctactacacggtcgcctaagtcttgccctgcacagaagccgcggccttcgccactaatcacaacacatcgaacatctggatttttagtccactggcttaaaacctcggccacttcacggtgcatatcaacgttaaagctattcagtgcttttgggcggttaaatgtcaggtagccaacaccatttttttcttcagcaataatattttgatagtccatcactcacctctaaacactggctttcttttctcaaagaaagcattaatcccttcgtttcgatcttttgtagccgccagccagacaaagttttgacgttcaaacttgagtccctgacttaatgttgtttcatgaatacttttaattgattgtttaatcacgcgaatcgctaaaggcgcttgtttggcaattttggctgcaagttgaaccgcatattcaacggttaattcggtcggaaccacttgactgcaaatgccatgttgctcggcttgttttgccgaaatcatttcacctgtcatagcccagcgcatggtgagttgttgtccaaccaagcgtgctaaacgctgtgttccgcctgcacccggcaacatcccaaggccaatttcaggtaaagcgaatcgggcattttcaccgcaaatcaccatatctgaatgcaaaaccaactcaaacccagcgcctaaggcatagccattcactgctgtaatcagtggcttactaaacgcatcaattttttgccaaagcttcgggcgaatatcgagttgcaaagacacggcgtccattgcagccaactcactcagatctgctccagccgcaaaacactgagcgttacccgttaaaaccaccgctttgacttgagcattatgttcagcttcttcgagcaactcgcataaacactgtaatgttgcattgtttaaagcatttcttttttctggacggtttagggttaataacaaaacaccgtcagcagctgtactggctttgatcaactcttgcatgacagcctctattcatcaaaactcaagcgaacatttgagccttttggtaaggtctgacagctcagcacatagcccttttcaacttcatcttcttcaagactatagttaaggaacatgtcgacttcgccagaaagtaccttacaacgacaggtcgcacacaccccacctttacatgcatacggtaagtcggcacccgcacgcaaagccgcatcaagaatactttcatcatcttgagccacagaaacaatcagttcacggccatctaaaataatgtttactttttcttctttacggtttgcatccgcttcaacactacgtttacgcgcttgccctgtatggaaacgttcggtgtgaatgcgctctttggcaataccaaagttcggtaaagtattttctacggcattcatcatttcgtccgggccacaggcaaaaacatggtcaaaatttgtttcaagcacttcaaaatcaaaaagttgcttaagcttttctgcatcaatacgaccgttcattagttcactatcgttgaactcacgagaaaaaatattgataagttgaaagcgttctttgaactgatctttcaaatccataatttgctcggcaaacatggtttgtttccatgagcgattgccatagagcaaggtaaagttagcttcaggttgttcaaataaaacttgtttaataattgataaaattggcgtgataccactacccgcagcaacgcctaaatagttttgtccgcccatcttggctgctttttgaaaaaacacaccttgtggtggcatgacttcaagcacatcgcccacttttaaatggtcatttgcccagtttgaaaattgcccttgatcaatttttttaaccgcaatactgatgtcttctttgcccgcatagctacaaattgaataacaacggcggatttcacccgcttcggttaaatggcgaatggttaagtgttgacccggttgaaattggaattgttcttgttgttcaggtacaacgtcaaatgcaatacaaattgcctgatcggtttgcggtgtaatactttttacttttaatggtacaaattggctcatggctgatttccttatctaaagacttaaatacatttgaagtaatcaaaaggctcaagacagtcctgacatttataaagtgctttacaggcggtagaactaaactctgttaacagtcgggtatgtcggcttttacaacgtgggcactcgacaccatttgttaagtgaacatgagttccacattgatgcgccaacccttcaggtggtgcaatgccataaacttgcagtttctttttccctgcttcagacatccagtccgtggtccatgcttctgataaatcgaccatgactttgaccggtgtcaaagcttctgcggtaaatgcctccacaatttgtgctttgagcatatccgttgctgggcaaccgctatatgttggagttagacgaacaataatttcttgttgatcgttaatctctacaccgcgaatcatgcccaaatcgacaactgataaaaccggaatttcagggtcacttaccgtttgtagaacgtcccaacattggtcgatgcaatgacgaatcatttgcatggctcacctccttgtcttaccaggtcattcccggataagttctttgaatacattgcatttcagccaataaataacccaaatgctcggtatgcaatccttgtttcgcaccacggcgataagcaccgttcacagcaacatttaattcaaaacgcttaagctcatctgcaatggtttggttccattgttctttttcatttgaaaaatctggaatcacgccttctgcaactagtgctttttcgtctgcactcagttcaaataattcagcggtaaagcgccataaattatctaaaccgtcttgtacacgttgatgcgcttcatctgtgcttaaacttaaacgttccatccagcttgtcgaaaagcgaatgtgatacttcacttcttttaaagatttgacagcaagcgcacttaattcaggaagtgagctttgcgctaaggccgtaaataaatgaagatggtaatggtccatcaaccattggcgtacaatcgtttgtgcaaagtcaccattgggttgttcgcacaacaagaggtttaaaaactcacgttctgtacggaaatacgcaagttggtcttcatcacgcttagcttcatcatattgaccagccaacgttagaaagtttcttgcttgacctaacaagtccaagccgatattggctaaggcaatatcaatttcaagctcaggtgcatgcccgcaccattcagccaaacgctgagataaaaccagttggctgtcgccaatatgtaataagaatttagataaaactgaatgattcatttgccattccccttacatgtgctcaatgccatctgggatatggtaaaaagtcggatgacgataaaccttgtctaaagaaggatcgaaaaattcagctttttcatctggctgtgatgacttaatcagttctgaacgaaccacccaaatgctaattccttcattacgacgcgtgtaaacatcacgagcatgttgcagtgcaatttcatcatcaggtgctcttaagctgcctacatgacggtggcttaagccttgtttactacgtacaaatacttcgtagagcgaccagttgtttttatcttccattttgatttcctcaaatttttccataaatcttgttaagccactttgttcgcttcaagctgctgttttttcgcgtagactactgctgcatcacgaacccatttgccgttttcccatgctttacggcgtgcttcgatacgctcgtgattacatggtccacgtccggcaatcacttcattaaattcgtgccagtcaatctcgccaaactcatagtggcctgtttcttcattgaactttaaatctgggtccggtacttccaagccaagttgcaacacttgcggtacagtgttatcgacaaacttttgacgtaattcatcgttactaaaacgtttgattttccacgccatgctttgtgcgctgtttggagaatgttcatcgcttggaccaaacatcatgagtgcaggccaccagaaacgattcactgcatcttgtgccatctgtttttgttccgctgtaccgtttgccaaagccatcatggcttcaaaaccttgacgttggtggaaactttcttctttacaaatacgtaccattgcacgtgcatatggcccatatgaagtacggcaaagcgcaacttggttcacaatggctgccccatcgacaagccaaccaattgcagcgacatctgcccaagtcaaagttggatagttaaagattgatgagtatttcattttcccattaatcaacttttccatcatgtcatcacggtcagcacctaaggtttctgccgcgctatacagatataaaccatgacccgcttcatcttgtactttcgcgagcaaaactgctttacgttttaaagtcggcgcacgagtaatccagtttccttcaggcaacatacctacaatttcagaatggccatgttgcccgatttgacgaatcaatgttttgcggtaggcatcaggcatttgatccttagcctcgatcgtaatttcattggcaatattttgttcaaatttctggtaattgttttccattctttcattccctgtaggtatcacccttaaatctatttttcgatacacaaaaaacaaagtcaactaatttttttgtatcaaattaaatccacaacaacaaaccaatacaagctattgaaatttatataattaagttaaatgtaaaaaacttttttacttttaaaaatcaaaataaagttgacttttatacaaattaatctgaaattatgaatcatatttttgcaatttttataattgatgtatcaaataaaaaaggagtttggtcatgcttgaacaagcacacctagaaggaacctcaactgacacagattttcagcagtctgagcatcaactgcctcatcttgcttcttatgtctatggaacatggcattcgtctgacgaagaattacgtaccgtttatcatgccattacaggtgaagcgatttatgccgtaagtagtcatggcgttgatatgaaacgtgttgttcaatatgccaaacaaaatggttcagaactggctaactggacattccaccaacgtgctaatgcgttaaaacaaattgcccaacatttacttgaacgcaaggaagacttctacaaacttgcttatgccacaggcgcaactcgtaaagatgcgtggattgatattgaaggtgggatccagacattatttgcttattcgagtctggttcgccgtgaactcaatgatgaaaaaattattactgaagacagctggattcaattatctaaaaatgggactttcggtgctaagcacattttaagtcctaaagcaggtgttgccgttcatattaatgcttttaactttccaatttggggaatgcttgaaaagattgcaccgacgctacttgcaggcgtgccatgtattgtgaaaccagcaaccgatggtgcccaattaactcaagcagttgtaaaagccattgaagaaacacatgtcttaccaaaaggcgcactacaactcatttgcggtcagacttatgacctgttagaacagttaggtccacaagactgcgtgacttttacaggttctgcctacacaggccaaaaactacgtaaccaccctcacctcaataaatattcgattccatttagtatggaagccgactcggtaaacagtgcaattttaagccctgaggcaaatgaagaaactgtcgatttatttgtgcgtgaagtcttccgcgaaatgaccaccaaagcaggccaaaaatgtactgccattcgtcgtgcatttgttcctgaaaacttgttagcaactgtgcaagaaaagctaactgccaaacttgctaaagttgtggtgggtgaccctcaaaaagaagaaaccaccatgggggctttagcgagcattaaacaaaaacatgacgttgcagaaaaagttgctgaactcagcaaagatgcaaaaattgtttttggtggcaacgatagctttacatttaatgcagatcatcctgaaaaaggcgcttttttcgctccaactttattggtgtgcgaacagcctttacaagcgacgaatgttcataccacggaagctttcggtccggtatgtacactcatgccatatcaaaacattgaagaactagctgaccttgtttcacgtggtgaaggtagcctagtggcttctgtcgttaaaaataacgatgagaatattgagcagattattcaaaaaattgcgccttggcatggccgtgtgcatgtactcgatgcagagtcagcaaaagaaagtacaggtcatggttcaccacttccacatttagtacacggcggccctggccgtgcaggtggcggtgaagagttaggtggtattcgcgcggttaaacattatatgcagcgcactgcaattcaaggctctccaaacagtctgacacaaattactcactcatggactgctggctcaaaagttaatgaagaccgcgtacatccatttaaaaagtcttttgatgagttagtgattggtgagcgtttattaacggcgcgccgtacagtcaccgaagcagatattgtcaattttgcttgtttaagcggtgactacttctatgcacatactgacaaaattgcagctgccgagtctttctttggtgaacgtgtggcacacggttacttcattgtgtctgccgcagcaggtctatttgtagatgcagcacaaggccctgtgattgccaattatggtatggacaacttacgttttgttgaaccagttaaaattggtgactcgattcaggttgaactgacctgtaaacagaaaacccctaaaccacaaaaagacgcttctcagcctgcgcatggcgttgtggtatgggatattaaagtcaaaaaccaacgtggtgaacttgtcgcaacttatgacattttaactttagttgctcgcgaggcttaatgtttaaaatgagatggggtcacctcgtccccatctcatttttttaacactcaatggcgttaacagcgagaccaccttttgaagtctctttatatttctcagacatatctctgcctgtttctttcatggtttgaatcactttatctagcgtgacaaagtgttcatcgtcatcatgaagtgccatttgggctgcattaatggcttttacagctgcaattgcatttcgttcaatgcaaggcacctgaaccaaaccaccaatcgggtcacacgttaaacccaagttatgttcaagcccaatttcagccgcatgttccacctgttcaggagacgctcctaaaatctcggctaaacccgccgaagccatcgcacacgctgagccgacttcgccctgacaccctacttctgcaccagaaatagaagcattgagtttacataaaatgccaacggctgccgcacttagaaaaaagcgaactactttgtcttcggaaaagtctttagagaaagtcacgtagtaatataaaactgccggaataattcctgctgcaccatttgtaggtgccgtcactactcgaccgccagcagcatttttctcatttaccgctaaggcaaataaattgacccattccattgcatgaaaagtcgtcacaatcaggtttgagtttttcttatttaataacttatcgtgaatttttttagcccgacgttttacgtttaatccgcccggtaatatgccttcattaattaatccgttgtgaatacattgctgcatcactttccagatttccataatcttgctacgaatctcagcttcactccgccagcttttttcattttcaagcattaactcgctcactgataaatgatgagttctacataagcttaaaagctcagccgcactgtgaaatggatatggaactttaacgtcgttggtttcagtttgggtgtgtgttaattgtctttcactgacaataaagccaccaccaaccgaatagtaagtttctgcatataaaatttcttgagccctgttatacgcaatcagttccattgcgttggggtgataaggcaaagattcatctaaaaaaagcacatcatgcttatagtcaaaagaaatactcttttgctgattaagctggatggctttattttcaagaacatcttcaatcaagcttgtacttacttgagtatcaatatgttcagggtcaaaacccattaaacctaacagaacagacttatctgtcgcatgaccgacaccggttgccgacagcgaaccgtataacttcacctgaactctaaccgtggcttgtaaatcgtcttgcttcaataaatcatccacaaaactgtatgccgctcgcatgggtccaactgtatgggagctagatgggccgatgccaattttaaaaagatcaaatacactaataaacacgtggtcctaccttcgattcattattattcgtatgttcgtcgttattgtgtcctttcggatagctctaaaattatcattaagccatctataaagcactgaaaataaatggttcattgcctaaaaacaacacaatcaattgctaatacagcctttttaaaaaattgaattttccattaatttaaatggtaaatgactcaaccaatattgaagaattgttcttttgagcaaataaaatcacaaacctttgccaattttttataaaaaatatttggttttcaagttatttacttgaaatttaaaatatttaaaatcaattaaaaacaaacatttacatagtatttaaatcattcactgtccataaatagaataaaaattcccctatttaccaataaccatatatcgtatacgatatatgaaagaacaatagttctgtcgttaaggaaaacgtaatgacaagtcagtttaaaaaacagttatctctaatggatcttacattcattggcttaggcgccattttcggttcaggatggttattttcagcaagtcatgtggcctctcaagccggccctgcgggtatattgtcatggattattgggggctttgccgttttaattctgggaattatttattgtgagttaggcgcagccttaccccgagcaggcggtattatccgttatcccgtattttcacatggcccattacaaggatatttattgggttctgtgaccgtcattgccttttcaagtttaattgcaattgaagtcgtcgctgcccgcgaatatgcagcagcatggttcccttctcttaccgccgtacatgatggtgttcgaactccaactaccattggatggttgtttcagtttgcacttttatgcgtattttttgcattgaactattacagcgtaaaaacctttgcaattgccaacaacctgattagtgcattgaaatttgctgttccggttttagtgatggttgctcttctataccattttaaacctgcaaacttttcaatgaccgagtttgctccaatgggcgctcacggcgtacaaggtgccgtatctgctggcggtattatttttgcgtatttgggtttaacgccgattatttcggtagccagtgaagtaaaacgtcctcaatttacgattccttttgcactcatcttatctgtcgttttggcaacgattatttatgtagtgcttcaagttgctttcttaggtgcagtacctaccgatatgttagcaaatggttggtcaggacttagtgacaagttcccattaccttaccgcgacattgccatgttattaggtttgggatggttagcacttttagttgtttcagatgccattatttctccgtctggttgcggcaacatctatatggctgcaactccacgtgtcatttatgcatggtcaaacagtaatacattcttccgtatttttacgcgtgtagatccaaaatctggcattccacgttatgcgttatggttaacgtttgcactttctgtattttggaccatgccgtttccatcttgggataaattaatttccgtagtttcagcagcattagttttaagttatgccctagctcctgtcacagtgggtgctttacgccgtaatgctcctgagcttgaacgtccattctatgtaaaaggatttactgttctcgggcctctcgcttttgtgattgcatcttttattgtgtattggtctggctggaatgtcatttcatggttattaggcgcacaaatcgtcttgtttgcactctacgtcatttttaagcgctacgtgccaacccaagaagtcagccttgcccaacagttaaagtcatcaacatggctccttgtttactacattttaatgattcttgcctcttaccttggcagcttcggtgatggcgcatcacacctattggcagcgcctttcgacaccttattcgtcatggtgatttctcttggttgctactactggggtatacgctcaggtttaccaaaagcactgattaaaaatgacgatgaagcttagcgatcgtttgcttaaacacatataagttaaggttttcttttgattaataccgtatacaaaatacaatattttcaaatgtaaaaccttcgctttgataactctccaacgtcagaagaagcacttttgacgttcactctcaagtgaggttgataatgttaaatattactggtcaaaattttattgcaggtcaacgttcaagtgcaggcagtaagtttgtattaagctacgatgctgcaacagatgaagcattaccctatcagtttgctcaagcaactcctgaagaaattgatcaggcagctcaagcagctgcattggcttatccggcttttagacaaactacgccagaacaacgcgccgtttttctagaaacgattgccagtgaaattgatgcgcttgatgaccagtttattgcaacagtctgtcaagaaactgctttgccggaagcgcgtattcgcggtgaacgtgggcggaccacaggtcaattacgcctatttgctcaagtattacgccgtggtgactatttaggcgcccgtattgatttggctttacctgagcgccagccacttccacgtccagatttacgtcaatataaaatcggtgttggaccagttgccgtatttggtgcaagtaacttccctcttgccttttctactgcgggtggcgataccgcttcagcacttgctgctggatgtccagttattgtgaaggctcatagcggtcacatggcaacggccgaatctattgcaaatgccatttgtagtgcgattgagaaatgcgccatgccaaaaggtatctttagcatgatttatggtcaaggtgtcggtgagccactggtaaaacatcctgcaattaaagccgttggatttacaggttcacttaaaggtggtcgagctctatgcgatttagctgccgcacgtcctgaacccattcctgtttttgccgaaatgtcgagcattaacccaatgattttattaaccgcagctctaaaagtgcgtggtgataaaattgcgactgaacttagtggttcggtggttttaggctgcggtcagttctgtactaatcccggtttaattattggaattaaatcaccggaatttagccaattccttgaccagttcaaggctgcaatggctcagcaaccgccacaaaccatgcttaacaaaggtactttaagaagctatgagcatggtcttaaagaattactcgcccatgacaaaattgagcatttagcgggtcaaccccaacaaggccagcaagcctatcctcagctctttaaagcagatgtatctcttttactcgaacgtgatgaattacttcaagaagaagtattcggtccaacgacaattgtgattgaagttgaatcggcagagcagctcgctctcgcattaagcggtctacgtggtcaacttacagcatcattaattgccgagccacaagattttgagaacttcgcgacccttattccattactcgaagaaaaagcaggacgtttacttctaaatggttacccaacaggtgtggaagtctgcgatgccatggtacacggcgggccatatcctgcaacttcagatgcacgcggtacatcggtaggaaccttggcaatcgagcgctatttacgtccagtatgttatcaaaactatccagatcacttattgccactcgcccttcaaaatgccaatccgcttggtattgcgcgcttggtcaatggtgaaatgagtaaagctgctctttaatttttttaaaggagtttatccaagagatgaactcctttttttagttcaaagcctccagcgtaaccgcacattatttaaataaaaaagtgcaaaaaatgaatagcaagatgctccatcaaatcaatgcgtaacatattttcaaataaggatattggtatatgacgacaacattaaaaaaggttgtagcggcctccatggttggctccgtagcagaatggtatgaatttttcctttatggaaccgcttctgccctcgtctttggcgaacttttctttcaacaaaccggcaatgctatagatggaattttggcggcctttgccctgtatgccgttggctttttagcaagacctctcggtggcctcgtatttggtcactacggcgataaaattggtcgcaagaaattattgcaaattagcctgattattgtcggtatcactacctttttaatgggctgtattccgacctttcatcaaattggctattgggcacctacactcctagtgatactgcgtttaattcaaggttttgcttttggtggtgaatggggcggcgcagttattttagtttcagagcacagtccagatgatcgcagaggttattgggcaagctggccacaaactggcgtaccgctcggaaatttagtagccacactggttttattattactttcaaaaaacctctcacccgaacaattcctagattggggatggcgctgtgcattctggttctcagcagtcgtggtactgattggtttatggatccgaaaaaatgtagacgatgccgaagtgtttaaagaagcacaggccaaacaacagcttcttgaaaagcaacaactcgggattattgaggttttaaaatatcataagaaatctgttattgcgggtatcggtgccagatttgcagaaaacattttgtactatatggtggttactttttcgatcagttatttaaagttagtcgtccataaagatacttcacagatcttactgctcatgtttggcgctcatctgatccatttctttattattccttttatggggcatttaagcgatatatttggccgcaaacctatttatcttattggagctgtacttactgctttttggggttttgtcggctttcctttaatggatacaggcaatgactggctcattatgttagcaattgtgcttggtttatttattgagtccatgacctactcgccttactctgcgttaatgactgagttatttccaactcacatccgctatacggcgctttcattttgttatcaagtcgcacccattatggcaggttcgcttgctccattaattgccctaacattactcaaagaatttaatagttcgattccgatttctttatatttggttgccgcaagtctaatctctattgtctcgattttgctagttaaagaaaccaaaggccgatctctagcttttaaagattaatctttgatatacaaattcagcacttaataatgatttgggttgttctatacaacccatttttttatctaaatatttttgatagaggcccgatacaaagtaggtgacatgcctgtatgcaatttaaactgacgacaaaaagcactatggtcggtataaccacagcgcaaaccaatttgagtaatcggtaagtcagtcgcaagcagttcagtagcgacttggagacgaattttgctaatcatttgccgaggcgttaaatggtatatttttttgcaataacgttctaactgagccaccgacacgccagcaattgcggtcaaatgcgccaaagtaatggtttcggcgtaattctttttaatatattcctcaacttgaaccattttgtaaaaagcaggatgtgtattttcaggcacatttaaatcattagaaatacccgctattcctactaggtttccatccgcatcaaataaaggttctttataagttaaacaccaacccgactgattttttgcatataaatgtagttctaattgctctgttaactttttaccgcggcgaatgacttgcaagtcttgcgatgtatatattttcccaagtgaatgaggaaaaacttcagaagaggtttttcccaatattgcagttttatcctttagaccgcagcgatttactaatgtttgattgacaaagacatagcgtgcttcggtatttttgatgaaaaaaaccaccgaagataaagcatcaaacaatggttctatactttccagattttttaagaaatcttccaaagtggtagttagtttcggaatttgaaccaaagtcatgagctagagcggacaaagttataacttgtctactctagaacatttcatttttgatttaaaggagaagtagacatcgccatgaggctttttacacgagtaggcagtaatggtggtcgagagttaggcaactgccaatcaaataaacaagctgctgctgttgcacacgtgcttccttggcacgctcccattccacagcgtgtatgtaattttgcatcaatccaactattacgctcggcaactttatcaaaagttacatcttcacatcgacaaaaaatagtttctggccgtgcaagcgtttttaactcagcacgtaacttaaagcttttctcaaggagatgtgcaaataaacgataccgttgtctttgagcaaataattgtctcgctttttcattttggcctatagctgcataacctgcgatgctaccttcaaccatcgccagctcacttccgccaaaacctgtacactcacctgctgcccacacctgtggctgtgatgtacgttgatagtcatcgaccgtaatcgcattgtccttaatttgacaacccattaactgccctaattgagtattcgggactaaaccaaacccgcacgcgagtcgatcacactcaatttcaatgattcctttcggcgtttgtagccttactcgttcaagacgctcctgaccaatcgcctcaaccacataactgttaggttgatataaacgataaggcaaagataacgcctgtattattttcgaaggccaacgccaaagttgtagtgcaaacttacgaacggaagatgaagccgcctgttcggcaacatagagaacttgagcctctgctttttttgccgtatccgcacttgctaaaagtaatggccctgaacctgcaatcacaatgcgttcatttttgacaggtgtgcctgctttaattaaggcttgcaaaccacctacccctgttacgccaggtaaagtccaaccgggaaaaggcaaaaacagttctcttgctcccgtacacaatataagctggcgataagacaagtttaggctgtcgtgaggtcgctcaacaagcaattggcctgcaaaaggtgcggcgacaattttcgcaccaaacataaattcaatattagaatgagccttaatttgttgatatttctgctgcgccatttcaggtacagggaaaatcggtccagcgcgccagatttgaccgcccgcctgtgggttattatccaatattaaaattcgcccgccactttcggcggctgcaatagcagctgacaaccctgcaggcccagcaccgacaaccaccacatcgtattgtttttccattattgtgtttccactttcatgtcttgctggcacagcgtctgacaagcaagcactctgagtccattaatattgacacggcattcctgacaaactcccattccacaaaatggagtacgtttttcaccacaaactgacaaacggctgtaagacttcgcttgtgctaaagcagcagcaacactcgtaccttcaatcacagaaaccggttggccgttaataaaaagctgaatcatctatgcagctcctataaaacgatgaggtaaaaaaggttctggatctatatcaaaagttaatccacatatgtgtgagacaatcagttttgctgtacctgttgctgtggttacacctaatccttcatgacctaccgctaaataaaccgattcaagtgcaggatgtcgtccaattactggaataccatctggagtagcagcgcgaaagccagtccatgcccgaataacattaagatcagccaaagctggaaaataatcgacagcctctttaagcacccgagtaaagacttctggctctacagttggatcaaccgtattgaactgacgagatgacccaataaaaagctggcccgtcggtctaggctgaatattacaagccaccgaaattccacttgtcgcttgagtactggccgcataagccaaagccaccaatgtatgctttacatttaattcagggtaacggtcagtaatcgccagatgaccttttttaggttcaatcggtaacactgggaaaaaatctgtcgcatgaatgccgttagccaaaacgatatgcgcagcttctagccatgttccatcacttaactgaacccgattttcttcaatatggataactttagcttgttgaacctgaaccttgtggggaaatttttttaataaccattcagcagcacaaggtgcatataaaattccatcatcaaaaacttctaaaccaccataaagaccctgctttaagtgaggttcaagctgatgaacttcatctgagtttcgaagttggcaacggacaccttgtgcagtgagacgttgatatttttcctcagcaatctgcatttcttctgggctacttgccagccataaagttggcgtttggcgataggcacagtcttccgaaagttcgtgtcctaattcatgccatagctgaactgaccaatgactaagttttaattcggcgtccaagtcatccataatgaccaaatgccccatgcccgcggctgttgcaccaccgatccgagcatccaaaacttgcacatttaacccttgccgagccaattcataagcacatgcagcacctacaatgcctgccccaatgacgatggcatcggttctcatagctgaataccccaagcaaatgggtcattttcatccataaataaagttgcttcggcactcatgtaagcttcaccacgaatggttggaatcacatattcccctgcttgttcatacgaggcaataaactggctaccgataatgctggcttgtttccataactttcctggctcaagtttgccatctgcggccaagcaagcaattttcgcactggttccagttccacacggtgaacggtcataggccttgcctggacaaagcacgaaatttttactgtctgcttcggtgtcacttgcaaataactcaatatggtcaatttcttgcccatctttaccggttattccttgtgccgtaagcgcttgtctaaccgtccacgcatattcagtaagttgatccaaattatcacttgcaacacgttgaccatgatcattaatcaagaagaaccagttaccgccccatgcaatatcaccagtaacttttccatatttttcaacattaacttcgactgcttttttataacgatatgccggtacatttcgcacactcactgaatgatcttcatgcagtgtcgcttcaacatcacctactggagtttcaattaaatgcgtgcctacttgtatttttcccaagtgtgctaacgaagccactaaaccaatcgtgccatgaccacacatgccaaggtagcctgtgttattaaagaaaataacgcccgcactcgctttgggattcactggcttacacaataacgctccaaccagaacatcattaccgcgcggctctaacatggttgctctacggaaatggtcatattgttctgataatatttttcggcggctttccatatctcctgtgcctaaatcaggaaaaccttcaagtactaatcgtgttggttcaccaccagtatgagagtccaaaatttttactgttttcatagaagtatccttacattttcctttaggatgactgatctcaaaacagcaagcttgatcgttttcttataaatctatgacgaaatcagcatagtgaaaacttacttcagctaaaataaagacaaaaaaattaggccattggcctaattgaaatgataaagaatgcagcgcttattttttcacatttttatggtgaggtaagtgctcataaagtgattggcaaacaccattaatatgctcttcaattaacttaaccgccaaatcaacatccttggctttacaggctttcacaatttctttgtgctcatcatttgcacgtgatttgccttcggaaacattcatctgcaatcttaaatagcgctcaattttatcgtaaatcgaacgaattaatccgagcatataaggtcgctgtgccggttcataaaggcacgcatgtaactgccaatttagtgtggtccaacttccaatatccatgttatcaataaaggcattacaaatttcatctgcctttttataagtttcttctgtcatattcggcacggcgagctgaatcagcttcgtttctaacataacccgtacttcaaaaatctgagctaattcttcttcagagattcgggtcacaattgcaccgcgattttttataaactctactaagccttcggcttcaagttgctttaaggcttcacgtaccggaattttgctgacattaaatagcttggcaatttcatcctgacggataggctcaccttcagcaatatgccctgcaataattgcttctctaatatatttgacaataacttcagataccgaaggcattgcaccaagatttgatacattaaaagatggtagcgtcacgaatattctcttaacctcaaaatatgacacaaacaaaaggatgataattttagtcatccaccataatgaaattattgctttgaaagcatcattttcggtacggcttatccttcatataaagcttttaaaaactatttttatatcactataaaccaataatttttaaaatcattcatatacaaagtatactttataccatttaattcacaaaactattattagactatgccgaaatcgtcattattttattgtatttaaccaagcaaatcgtcataaataccagcatactaccctgttctcttgacgggaaactgtcaaaaattcttatccattgagctgattattccttacaaggtaaaaattattatcttgtagaaatcttgctgcataaaactttcagagtttgagtcacttcatatgagtacgccaacagaagcaaaattttccctgacttattatacgggtttcttatctgtactatttgctgcttttctatggggtacggcaggcacagcagcatcttttgcaaagggcatcagtccacttgtaattgctactatttctgtgggcttcggtggtttaattcacacatttttaagtttaaaagccattaaaaaagattaccgaaagctttttgactataagaccaaagttttgattgccgtcattgtttctattctttgtccgtttgctttttattcctcggtttcattagctggtgtttctattggtactgttatttcaattggctgcgcccctttgttctcagttatgcttgagtggctattagataaacgtaagctttctttaaaatggcttatcagttttattcttggttttttaggagtcgttttactctcatatgcaggcgaacacagtcaccaacatcaaggcgtccaatccgaacggctattaggtgtattttttggcttactctcaagtctgagttatgcaacatattcgtggattatgaaaaacttaatccataaaggcatcaactcaagagctgccatgggcgtgatctttgggatttcagcagttctgttattacctactttattaattacagcaactcacctatttaattatccaaataatatttgggtagccctttatatcccaatcgtacctatgttcttaggctatttattttttagctttggtttaaaacgtattccagccagtcaagccatgacgttagctttggtcgaaattcctgttgcagcgttattggcagttgttgtagtaggcgaaagtttaacaatgaatagttatttaggtttagttttaatattcctctgcgttattgtcctcactaaaaaataaataatagaagtaaaaaagaggctaaatcgttagcctcttttttttatagatatttgcttagatttcagctgaccagttacggtaccaagtacggaataattcatactgagtttcaacgtatttacgttgtgattcactcaatgcatccgtctcgttaaaatgtaaggtatattctttatcgccattaagtaccattaagtacttgtaataaaggactaaatcagtaccttcatcaaaagacgataaaacttctaaagcgcttgataattcttgtgccaaacgacgagctttcgcatcgcctgctgcagctttcttactaaggtcaaccaactgtaaaacttctttaggcaaagcattaccaatgcccgtaattgctcccgttgcattgcagttaacgaaaccatggaaaacctgagtatctacaccagccattaatgttacagagtcatcttgagaagtgatgaactcagctgcataacgcatatcagcagcaccaccaaattctttaaaaccaattaagtttggaaattcacggcgtaattcaaaaaacaaatctgcacgagtcgcaaatccataatacgggctattgtaaattaccgcaggtaagctaggcgcagcttttaaaatcgcagaaaagtgtgccttttgtgcagttggtgatgcaccacgtgataatacacgtggaattaccataagcccttgtgcacctactttttctgcatgagctgcatgagaaactgcttcttttgaattaactgccccagtacccacaattgtcggaataccagcagctacaagtcgtgctacaccttcttgacgttgagcttcggtcaataaaggccaatcgcccattgaaccacaatacactaccgcactcattcccgcttcaataagctcatgcccttttttcacaagcgcatcaaaatctggctcacggttaggagtacatggagtcattagcgccgggatacatcctgtgaagatattactcataattattcctcagtaatatagttaaaactattggtagttgtacttttgagttaatccatctcaaaagttatggaatgggtatcaatagctgtccaatcattcttcatatatcgtatacgatatacataaaaaagaatagtctttgttctaaaattcttttcatctaaaaaaacgtataaaaaacaaagataaaaactgtagaactgataaataggatatgttttgaaagcttttttctgatttattaataataaagattcaaaaattaaacgggtctgaagaaaattatttactttcaaaaatggttaaaaaagatacaggaaacattagccattagtcgcacatccctatttttactcatttttactggtaaagtgctctacatggtttgatacaacctacttaactcagatgcataattcacctgttacctgcatctgaagtttttctgcctctagtccgctaggggctttttttatgattacttaaaatatgttctattcaatgggtggaaataatacaaagaaaaaagcctactcaagaagcaggctttttaatcatttattttgaatcattggcttttttaactttagcatcgtaatgacgatagcaataaccaaaaactgctccagcactaaagaaaaacattgcttgcatcatagctcggtcctacacatgatttaaaaggaacttaaaacttaacacctatgtttgtttttctttgaatgaggtttaacaggtttttgtgcattatgaaaatttatgtgattaagcttaacaatttatttggctgcctaaaaaaagcctgtcttttgacaggccttcttgttcgaacttaagttaattctttaattaaagaattaaccacatgttgcttgagtaatttttttagaagttggatcaattgtgacagttactcgatttgaacgataatccattgtcatcggttgacctggagcaactttacgaacaatttctgacttcgttttttgcttaatttgatcatcggttaaaccagatagcccaactaatttttgagcttcttctgaaacacagttcgcctgattatcacggaataatttccattcttcgacgacttgtccatttggcaaatggcaataacctacctgaccatttgcttcatttctaatttctaatttcccgccttgttcaacgcaatattgactagcaggatttggtgaaccaatttttggaggagttgaatctttatgttgtactgatgaacaagccgttaacgaaacaagcgctaaaccaagaaagataatttttttcataaattttgcttcttactaaaagaaataaagatatcaaaaaaatttatgttttatatgacttgtttacaataaaaaaccttcatagagagcaacttacaaaataattctctattgcaaatgttaaattatgatgcgttatatctaacaataaaatttatcttctatggtctttctaaaatacgcggcccggcaccttcttgtcccaacacatcatttggattccttaatggacattgttctaatgacaaacaaccacatccaatacaccaatccatttcatctctgagtcttgtgagtttttgaatacgctcatccaaattcttccgccaatcgagagatagctctttccattgttgtgcagttaatttagaacccatcggatacttacttagggcttgttttatttcatctaatggaataccaactttttgagcaattttaatgatcgcaatgtagcgtaacaccactagagtaaaacggcgttggttaccattggttcttatacttttaattaaacctttagattcgtaaaaatgaagggttgaaactgcaacaccgctacgttttgcaacctcaccaaccgttaataaacgactttgattcctttcactcatttttattaatctcaagcttagttgaggtcttataaaaggatgctctgtactgtacacgacaaatttcacagaacccttatcctatcagggttctgccttcttaaaattgccaaaatttccttaaactcttcttttttcccaaaaccaattaaacgctgaatcgccatttgaacatagtctaaaccatagcgaaataaactcattgagagtcgtccatgcttctttatttttatcgcttttttttgatcatgttgccattcacccgttaagtaacaccaacagaagcttatagctaacaccgcaatcaattttttcactcgtctagggtctgtcaagcgcgtattttcaagattaaacccgcgtcctttgagacaactgaataaggtttcaatttcccagcgtaatgcataatcctgaatagcattggcattaaactgaggagaaacgacgagtaaaagctctccattttctaactgtagtgcacttatatatagtttcacccgaccaaccaaaatccgtcgtttacgacattcaatttgaccaactttaagatggcgaaataaatcactaattttatgattctttcctaaatgattggtgacaatgaagtttttttaacacgaatgcagaagttgatgtcttgttcaattaaccatgtaaaccactgctcaccgataaactctctgtctgcgaacacattcacaatacggtctttaccaaaaatggctataaagcgttgaatcaaagcaatacgctctttcgtatctgaatttccacgtttattaagcaatgtccaaaggataggtatcgctattccacgataaacgattgcgagcatcaggatattaatatttcgttttccccatttccaattggttctatctaaagtcagttgcacttggtcgaatgaaaacatattgaaaatcaactgagaaatttgacgataatcaaaatactgacctgcaaagaagcgctgcatacgtcgataaaatgattgtggtaagcacttgatgggcaaggctttagatgcagaagaaagattacatgtttgctttaaaataatcacaagcatgatgagcgcaaagcactttaaatgtgacttgttccattttagatatttgtttaagataagatataactcattgagatgtgtcatagtattcgtcgttagaaaacaattattatgacattatttcaatgagttatctattttatccgggagaaaaggatgctaaaattttgtcaaattgccatctaactttaacctttcagcaatttaagctatttataaaaattaaaaactataatttgcaaaattgaataaaaaaacatcaaaattatttaaattcactattcatttttagattcaataaaaatattatggcctgctttcacaaccacatatccagaacatattataaacaaatggcataggtgcacctaaaggatagactttagcctcctctattttatatgtcttttttcttgattcgatatgtaaaatactatcgcaacgtgcaattacagttccttttttatatagtttttttctttcattttttgcatcgaatttatataccaaaaagtaaactttttcccctacctctatccttgaatgattaaccataatgtaaccattacaatacttacattgccaatcgtccatatcttaaaatatcacatactcaaatgagaaaaatagaataactgttttagtataaatttattaaaaatataaatctaaaaaaatatttaaatttaaaaaataatacttatttgagacgttcatcacacaattttcctagctaaaacttagtagataaatatataaaagacaaatagttacacaaatataaaattattactattttccattgagtgcacttttttaacaatagaaagttaaaattatttttaataatattacacaaatataatatattatttgttatatgtaataaaattaaaaaatactttattattcagcacaaataataaagattagatattttcatcattaattgaaaaaaattcatttttataagcagttaaaaaatctaaaatatataaaaatataacttattttttaattatggctattcaacgtcaaaaactcgaactcccatctggacataataaattattactccattcttgctgtgctccctgctctggagaagtaatggagtcattaattgagtctaatataaacttttctatattcttttataatcctaatattcatccggtaaaagaatatctcattcgtaaagaagaaaatatccgcttcgcagaaaaacataatattccctttattgatgcagattatgacaccgataattggtttgcccgtgctaaaggtatggaaaatgaacctgaacgcggtattcgctgtaccatgtgttttgatatgcgcttcgagcgtaccgctttgtatgcatatgaacatgggtttagtctaatcagcagctctttagggatttcaagatggaaaaatatggcgcaaatcaatgactgcgggattcgcgctgcttcacactatcccgatattcagtactgggactacaactggcgaaaaaatggtggctctagccgcatgattgagattagtaaacgtgaagaattctaccagcaagaatattgtggctgtgtgtattccctacgtgatacgaatcgctggcgtatgagtaatggtcgagatcgcattaaaataggtgttaagttttatagtaatgcaatggaaaatgattaaaaaaacttatagcgattcaaaaataaatatttaattatatttatttacttctagattttctaaccgcaaataaaaagagccacatctggagaatgtggctaaaaggtgtacttagacgagctttgttttattagaataataaagctagcttaaaataagattaataaaaaaaaatttattttagaaagttataaaaataagcaatttcttttctcatcaaatttattgtgttagtttttaatactttaatgtttctataaaacattcatatccaatatataatttcatcaattagtcagaatgaagtgtaattatgattcaaaatgaaacgatcgaagtctcgccagttcaacaacaagactatactcaatggttagaatattgggttgcctatcaaaatttctatcaggtcaatttacccctccatatcacaaaaatgacttgggatcgttttttcgatgaaaaagaacctatttattgtgctgttgccaaaaataaagaacgtatcttaggttttgtcacttatatgtttcatcggtctacttgggcagaaaataactactgttatttagaagatctgtatgtatcacctgaagttcgtggacgacacattggtaaacaacttattgagtatgtacagaagcaagccaccgaacatagctgtgaacgtttatattggcatactcaagaaagcaatcaaacagcccaaaagctctatgattggattgcacaaaagcccggcgttattcaataccgtatgtctttgaactaagcgaagttaaacaccaaaaatttttactcttttggtgttttagctttaatcatttttgactacccaaatagattggtacttaaagcttgctgcgaatgagtttgactaccttatcattcacagttgagcattgattaaatgctgcaaaacgcttgagttcctgatctaattcaaaaaagaaatgctctttatcttttaccgttttttctaaatgtagactaatcacttctagttcttttactgtccggtgtgctttacagtcgattcgtcctactaactcattttgataaagaataggcaaacaaaaatatccaaatacccgtttggccgctggcacatagcattcgatccgataatcaaattcaaataaggaagttaaacggtcacgatgaataagagagttatcaaaaggcgaaagtatttttagaccaaaatcagtatccaattgttgctctattgcagttacatcaacatataaattttgtccgtcggcaagtttaatcgctgatacgacacctgcatcaatctgctcttttagcacgacacgcatggtttcttttaaatcatttttctttaaatgaaccaattgtttccacgtaaatgcaccatgagctcgaagcgtattattaaataaatactgagcatattcgtaaagcgtaggcaaacttaaatcaatattttcaggtaggcagcgttcagtcaaatcgtaaactttttccataccgttacgttcacagatcatcaggtcaccttgcatatataactgctcaaaagcacggcggcctggaccggtattccaccaattccctaaactctctttatttttcttatcaatatcccttaaccgaattttaccttcggcacgtacacgtaccagaatttcattcataaggtgttgatcgcctctattaaaatagcgactttccccttttctgacagacatcattgccggtaatgcatatcgataatctttcataggaagataagaggccgcatgataccaatattcgaaaatctgccgttcacgaaccaaactgtttaaatggcttaaatcataatccggcactcgactccacaatatatggtgatgagcacgttcaacgacagatatggtatcaatctgtacataacctaaatgctcaatcgcctctaatgttccttgcctacctgctgcgaatggactattttttcctaagccctgttttaataaagctatttttttcaaagaagatgtcataaaaatcaaatattgttgtgttcatttaaaaactaaaagtttcaatattatcctatcacttttctttaaccatcttcccttcaaaatagtatttctttgggtccgtaatattctttaatcacctaaacttttattagtgaattttgttataacttcttggagctaaccttaccactaacacaataaccaatatcacactacataaatgaaaaatccaacctgccttataagtccctgtaaagtcatgcaaagctgctacaaaccaaggcggtattgcagcaagtaaaaaaccgcctccttgcataagtgcagataaagcacccgcattgttcggctcttcaaaatggtctaatgccacaataagtgttaaggcaaaacaacctcccaagcctattcctaaacaaattacccataacacagatgcaaattcaggtataaaagcaagtcctgcaaagccagcaaattgcatgaatagagtaaaccacaaccacggacgtcgatctttatatttcctagctaaaataggcaaagacagagccgaggctgcttgactcaaggcaagtaaggcaagcaatttaccactttgagaaatactccagccatgatcttgaaacgaaggtgccaaccacgcaaccaccgaagaatagccaccattgaccaaaccaaaacacagcattaacaaccatgttctaggtttctttaataatgtttttacaggtgacagatgggcagtcgaacttacaatggagggtaaaaaaataaatgttgatactagtgctaatacagcgggtatagtaaagaaagccagccccagtgaccatagacccgttatattggaaatcacaggtgccaaccatgcgcctagtgcgccaccacccataagcatagctgaataaagccccatcataggcccgatatgttgactaaactctcgtttaataattcctggaaaagcagcctgtatcagcgcgacgcctaaaccaataattattgcactagcaattaaaccctcagctgtaggaaataaaaatctaagtgcgcatccaatacaaatagtcagcaaagcacccaaaacaactctgcgttctccaaccatgctctgtacgattggaccaataaaggcaataagtcccatcaacatcatgggcaataaagtgagtaaagctattccttgtagacttaatccagtacctgctcgaatctttgagactaaaggaccaatactggtcataaaaggtcttaaattgagtccaaccagagcgactgtcaaaataagcatgggacgagccaagaaagctccagactgcttcattactttaggcccgattgcttagcttgataatttttccaaaacacataaaggtcggtacggtcttcaaatcgaacgggcacacattcaattttcatagactgttcagcaaatggttttacaagatcggcatatatttcagctgtagataaaccaaatggtgcgccatcttcattagaataagcatagttaactgtttttatacccgctaaacgcattgcagccatacacataggacatggatgcccgcttgcaaataccgaacagccttctaaattcgcggttcctagaacttggctggctgcccgaatcgccaatagttcagcatgtgcagtcggatcattggttgtcaaaatttgattaacacctgaagcaattactttgccatcttttacaattactgcgccaaatggtcggccacctttttctatattgttataagcaagctcaatggcttgacgtaaaaattcctgatttgctttcacttattcctcctccatctactttgcaccagctacaagcaggagtttttcaatttcacgatatcctcttgtacgtgcatgttgtaatggtgtgatcccatctttatctgccaaattcggattggcaccagcttttagcaaaagtgccacaatttgctgatagttggatttgccattacctaaaatgattgcttctagtaaagctgtccaacctaaattattgacatgatttatgtttacacctgcagcaattaaagtacggacagtttctacatggccccgttctgctgctggaataagcgcggttcccccataacggttagtactctttaaatcggcaccatgcatgagtgtcattcgtaaaatttttaaataaccttgtgcgcctgcatacaaataaggactatcttgtatattatctttagcatttacatctgcgccggcctcaatcaacatatgagcagcatgtatattgtttgctcttgttgccaccattaatgctgttgaacctgtttcatcacgtgcatcaattaaggtcttttgagacaaaatatgttttattaactgaatatcgtcatttgcagctgccatgtgtaaagggtattcatcctttgcatttaccacatttgtaaaacccaaagcacccatcgcaatgatcagattgatccatatgagggacttacgcatgaaacactccaaataaaaatgaattgcataacaatttggcactagaataagcgcgcttaaaagtatttgaaaattaaattatttaatcgattgtattaagattataaatacttaagcatcttgttctctgcgttattgatggtattcatttatgtttgaccctcgtcttcttcgtgcatttgtgaccatttttgaaagtggtagttttacagccgccgctgataagttgcatctgacacaatcaactattagtcagcagttagcacgcctcgaagaatcggttggtcactcccttattgatcgcacagcaagaccattacaattaacagcttcaggtgaatatttaattggttatgctcaaaggattttgacgcttcaacaagaggccgaggcggtcttaaaagatccagctggcagcatccctattcgaattggattgccagaagatatgatgagtactgctatggcagaagtttttggtctatttgctcaagaacatcgtactattcggttagatgtcacttcaggcttaagccgtaacctgacagagcgctatcgtaatggtgaactggatattgttattgtgaaagaatcagcagccagcgccgattgttatgcctcttttcctgaagaaatggcatggtttgaaagtgaaaatgcgattacgcctttgtctgaaccaattcgtttagtgacctttcctcaaggtggactttaccgagatgaaatgtttgaaacattagaacgtgaacgacgacgttggtatattgcttttacaggaagtagtttagaaagtgttctagtgagcgtcgaaacaggtttgggaatatctttactaccagttagtaccacaaaaggccgtcgtgtacgtagatataaatctttaggtgaagcttcacctatggttgtttcaatttatacatgggaaaaagctgggttgatttcccagcttgtcgatcacatgactaccgttttacatgatcgcttccaatcaggctcctaggtttaactgatgtcatttaagctttcggcaatcagcttttccgccatttcttgagttttcttcaagcctggcattcgatattctgtatggccataatcttgtatagatttccagcgaccaccccatgtaagcccgacagactcagcaacttgcccatataggcggtaaccctgcatagcccatgggtcacgttcagaaataacaactttaccgtttcgcttaaaggccacatctgccgctaaaccaaattgatgataactttgatacccttttgctctggttgtattcggattgcctgccaacatattttgacgtgctggactacgataaccttcaagcaaaacaagttcataaccatattgttctttcataattttaaagaccataagcaaacgctgcttatagcgtgggttcattttatcccacttacggttgactaaactcgtatctaaaatcgcacggccatcaaaacttgtattatcaattggtgaagaatttataacaccactttcttgagaagcatattgctgctctaactgagttgcttcaacaattgcagcttcaatcaggctttcatctacttcaggtggaggcgataatatttctccatttaataatgcataaatttgcggatcagtttttttaagatactcggcttcaattcgtgttgaactgattgggcgagtaaaagcaaaaattaaaatactggcaaataaaaaaaatcctgcgattacaatccaccattgctgtaaatgccaatgtgattgtagtttttcaggagccgcagcctgattcattgtttgagcaaattgtctaacttgatttagctgccgacgcccctgaggtaataaagatagaacaaatgttctacccttatttcttaactcataagacatcaaaaatgctaaccctatagcaaggcaagcaaaacaaaagaaaattagaaaaatcatcatgacttaactaattcacagcaaacggacttcgtgtaattttaatatcaaccgaagctttaggtggttccacatcagcctcttgttcaaccggagctttatttacctcagcgggtttggcttgaaccactttcgtctgggtagccggtttttgctgaactacctgtagttttggctgtacaggtttagctacagcctgttgcttaggtacaacctgttcacctgttaactgtgcatcaaaaggtgaaacacgttgtgggttaggttcggcctctttatgaggagcaggcttaaaaatgttacttaactcattctctttaggttgctcaaaaccatcatggctcatcggatcagtttgctcttgctgatcacttactgcttggtcatgtgcagaagaattagtcatcaagacttggtcaagctcctgatcttgattcgatttgctctcaacacttgtagggtcggatgaatacggttgagacaagaacaggaacagtgagatacttacaaaaacacctgcaataataccaatgatgatatagattacgggtgatctcgacttttttttattcgattgcaaaactcgaatagaagttggtttttcctgagccatttctttccatcatcaaggtaagtaaattgtaatatgtgcctgctcttgtggggcagaaatcacattttgataattagataatgctttatcattttgattgttaagcataaatcttaaacctgcaaaggtaagtaatgcaaaaatcaataagaaaatcaaaatccagaaaaaaggtaactcacgatggataatatttcgtatctgatcaggaattgccgagaatggcgaaaaagccacttttttccctttcagataatcaatttcatcgcctactcgtgccaccaaatggttaaggctttcaattgactcaattcggtatttaccctgaaaacctaataataagcagtaatggaagacttcaagagcagctaatcgatcttttccacgactacgtagttgctctaaaatttcgaagaattgataacccgctaactgtgaaccaaacaggcttaactgtaatggactaattaaccaagaattttgtaaattaaaatagcttgggtcttgctgggttacgatcgtttcatcaattagcgcacaaaacgcatatttagcatcatgaatatcatcagctgaaaattgtaactttttcgcttgttgctcaaatcgattaagcaaatctagaattttttcacgaaagcgctgtggatcagctggcacatactgatttcgaattaaaaagattaagtaaaaaccatcatgcaataaatcaatcagattaattgcctgtaattttacttgggactggctattattgttcccccctgtcccaatttgcccatcgtcaaataaagaaggagcacctgtagattgtgacatttttctctcctttatctttaagcgttcatgaccgcaatcagctcaatactgatatcttggaatccagccggaacataaatacaaatcgtttctgaatccaacatacgttgatagagttcatgatgcagttcgatttcaaaatagctcacacccgaacgtactggaatagcagttggaacttggattaagtggtgtaatggaattgctggtaatgctgcaacaacacgttgttcaacatctaaagtactaccgattttaaaacgtagaggaacgatttgaatcaactcatgggtctgcatcacgctacttgatacagcaatataaagtctggtatctcgagtaatcttatcggtttcgagacttcccacccaatatgaagggcgaatttctttaagggcaatactgatgtaacgactcgaaataatcgtatcgagtaaatcacgtaaaattgtgtcgagctgggtgaaactctcttgcaaattatgatgtttatatgcaggtaactgatcaacttcataagctgtcgagaaggttaataatgaacctgctaaacgtagcaattcaaagaataatcgttccggatgaatttgcggatattgcaagaaatggctcagaccagcatgagcagtatttaaagcatttaccaaccaaaacgaaacgatatcacctgaacggaattcaattaatttctgctcattttctcggttattggtttgaatcgttttaatttttgccttaataacattcaaggttctttttaaatttgaaaccaaggtctcagatgcatcgacatgcaaaatgggcggaataaatttgcggtcaatttcaaaagcacctgaactctgacgtttaattttgcctattggcaaatacaggaaaccatctaaattatgatcaggattactatgtgcatctaataatttaaacacagctcgacgacgtaataagctgatatcagcctctgtcgcgtttgtgaacagatcatgggtctcaaccaaatgtgattgatagcgccccttttgtgattgattttgatcgattaaattttgtttattggcttgtaataatggtaatgccaaatagatgaccatttcaccacgtaaattaagctcatcaagcaaaataggttcaggtaataagtcataagcaggcgcttgatatatttcaccatcttgccaaatcatttctaccgattcaagtgcaagaatatgcgtacttaactgtgcttcatcaaaactaagtttttgaacgccataggaaaatggaacaacagcacgaaccgtatgatttaaacgttgttcatgataggtatcttgaatctggaaatgttgaggtcttaaaaataaaccttcaccccacaggactttttcagctttaaacatatctctttaccaatctttattcatattcatttttaggttgaacacctaacatttcctgaaccatttgcaatggatgctcatctttaatcacttgtgctaaccattcatgcagcggcatttggctccatttaatggtcttttggagcatatagctcacaggactatgtggctcatttgcttgaaaataatcagctatttcttgcagcactttcattgcttgctcgcgattggccaagtgagtttgtgcttgtggctgaaacataggctggtctgatacgatttgtacaggcacttgattttccatagacggtgtcgtgatgacagcggcctgttcttggctcggcgcaagcccagtaccaaaagcctctgctttgtaaattttacgtaaagtgctgtgtattgtttcaaatgcagaatcaattgcagcaaaactcggtgaatctaatcccattaaatggtcgagtgtctgttttaaaacattccactccgttaaaaccgaattaaactcttgataatttgagtattgaaaggttttagaggtattaaagatcgcttgatcaaattgttctaattcagatggacctgactgactctcgtactcttctgtttgcttacggcgtatattttcgtgatatagaaaattatcgtaatcaagcaagttataataaggagctgtattggttaaaggtactttcttcaacagcattggcaactgattaataagaccttgtaataaaccaatacgctgatccaaatcatcatcttcaataatcggatgaatatcctgccaatattggttcagcatggtatgagttaaagtgattccctttaccatgccttcaaaaccatttagatgagtccaggcttctattacccaagttaatagacggatatctttggttttttcaatgagcaaagtgcttacactcttcgcaacaaagtcccaatctgcctgcttccgttcagcaacccaatccccctgatctaataatagatcatcctgtgttctggctttctttatctcgtgaaattcattagaaaatgaataatcctcaccacaaagcaagctgtcattaatgggtttaagtagttcagaaatatcaatactcatctaattttggctctattaaatttttaaacttctgatttcaactttttactagtccgttttttagcaggcttcgccacaggatctagtaaatattggatctcgtcatcttttgcatcaatcatgatcaatttcggcaatttttgatctgctaacgccactaaaatttcagttgccaaagcaggtaaaactgtagaatttaagatgttatcaacattacgggcgccactatccacttcagtacaacggctgagtagcaactcgaccaagtcatctgaatattgaacttccgttccatattgtttttcaattcgagcagtaattttgcccaatttatgtttaataattcgaaccaataaatcatcatgcaatgggaaatatggcacaactctcatacgccctaagaaggctggcttaaactgtttatataaactcggttttaaatgttcgattaaatcttccgcggtaggccattcttctacaggctgatttaaacatgcctgcataattgcactcgagcccgtatttgaagttaataagattgtcgtgtttttaaaatcaataacgcgcccttcaccatcctctaaagtacctttatcaaatacttgatagaacaactcctgaacatcgctatgtgctttttcaatttcgtcgagtaacacaacactataaggattacgacgtacagcttcagttaaaaccccaccctgaccatagcccacatagcctggaggagcacctttaagcgaagagacagtatgtgcttcttgatactcagacatattaatcgtgattaaatgctgttcaccgccatataactcattagccaaggctaaagcagtttcggttttaccaaccccactaggtccaactaaaaggaacaccccttgaggtttatttggatcttctaatttagcttttgaagttttaatcccttgaactaattgtgtaagtgcataatcttgccccattacacgctcacctaatttatcttcaagcgttaaaatctgcttaatttcatcattgaccattttcccaacaggaataccagtccaatcagaaataatttcattgatgatctgagagtttactcgctcaaaaactaacggctgttgtccctgaatatcagcaaggtctttgcgtattaaattaatctgatcgtaggcttcagactcattagaatggctctgcgcttctaattcctgaattttacgaactagctctaattctttttgccattgttcctgagtctcttggatctcactttgtaatgactctagttggcttttcagattttctaatctttcatgatgtattggaatctgacggtgttcattttccaaaatctgttgctcaagctttaagttatgttcttgtgcttttaattgatcaagtttgactggctgtgcattttgggtcaaagctacacgcgctgccgcagtatcaagaacacttactgctttgtctgggagttgacgaccactaatatagcgatgagaggcatgtacagccgttacaattgcttcatcatcaatttgtaaattaaagtgcttttgcattacaggaatcattgcacgtaacatatctacagcaacttcttcggtcggttcttcaacctttaccacctgaaaacggcggctcaatgcagcatctttctcaaaatactgtttatattctgcccatgtcgttgcagcaatagtacgtaactcgccacgtgcaagtgcaggttttaaaagattggcagcatcgttttgccccgcttggccaccagctccaataagcgtatgtgcttcatcaataaataaaataataggatgagccgatgattggacttcttgaataacttgctttaaacggttttcaaattcacctttaacacttgccccagcttgcaaaagccccatatctaaaacatgcaaatgtacattttttaatgcctcaggaactaaaccttgagcaatttttaaagccaacccttcaactacagctgttttacctacacctggctcaccagttaaaattgggttgttctgacgtctacgcattaaaatatcgagcatcaaacgaatttcatattcacgcccaataacagggtcaatcccaccattcttcgctttttcagttaaattaattgtatattgatctaaagcaggtgttttttgagtttttgcagttggagtcacggcttgttctaattcatctgcttgtgaagatgtttttgattcttcttgttgttctacacttttttcacaaatttcgagaaacttatgtttcattgagtctatcgggaaaagatcgaataaactcgaagctctcgttgcaatttgatagaggtcaggtgcagttaataatgcaaccagtaaatgaccactacgaatgacaggattttgttctgctgaagccaataaccaagcttgttcaaataaacgaacaattgatttagcaaaaattggagtacgtgtattaccttttggtaattgagaaattgtttcttttaaatcatctgctaaagcatcggctgagattttatatttttttaataaaatttttaaatcgttttctaaaggctgattaagtaactctaaaaataaatgttcaatttcaatttcgtagttttgctgaagaacacaagcattagcagatttttctaaagcagtgcgtgcagctgtagaaagttttgtaattaaaatttttaaactactcatcattactctcaatatttttaaataatttaatacttaaaatcataatgcccgtatattaccaaaatttagctttatccgacaaataacccagcattacaatcattaatatgatttattcgatttcttatatctgaataaaaaatctaataccatttaagatcatttaattagtacacatatctttttaacttaaacatttaagaaaaaaagatataccctctgctacccttgattaaccaaactttgtttcggtaataatttacagccacacgataatgaatcatttactcttgctgctgcttttcccatcacttgcatatttgggtcaccggaaacaatcgtagaaaccgttttatgcgccggacaagttgctttatcacctacacatgcaattgcgattccctcaattaaaaatgcactattaccagaaatgacttgccctccacctgtcgttgggcatccaatcgtaatgtaagggctagccatattcttctccttatccctataaaacggtgaactcaattcggcggtttttcttcctaccttccgcagaagtattgtccgctacaggcttagatgaacctaaaccttcggtagataaatgatcagcaggaatattcttactaattaaataatttttaactgctaaagctcgatcttggctgagttttaagtttttggtcgcatcaccagaactatcggtatgccccacaattttgacttttttcccgcccactttatttaaagccacagccatttcatcaagaattttttgcccagcttcagttaatactgcactaccagattcaaattcaataattcgattttttaaagcatcatcaataatcttctgctcagcctgatttacagaaagctgggaaaataattgatatggaggctgtaccaaactctgaaaagactgaatggttggctgtatttctgtcggatttagcattttcccggtcagttcaaatcgggttccattaacacttaacttaccctgagaaacttttttaagatcaggtgtaatcactcgtgtgacagagtcactccatccatttggagcggcaactggtcgaacttgtattttatcgacaacctgatctgcaccataaacagactgcattttcattaaaatagcctgtttacttgcttcatttggcactacaccttctacaactataggctgtgctaaagcataattcgcaattgcatatataaaacagccttttataagttgtgaaagtttaatttgatatttttgattcattgttattcacccaaaaaagtctgtctaaatagttttaaaccttgatttaaacttaattggcgttgacataaagattgttctagcgttgctaaaccagcattctgttccaaataagtatcaatccattgagcttgtattaaagaaacccaatgtttgctatccatattctgagtaaaaatatcgctaagagctaaaatatcagcaccctgaaaaccaaagaataatactggctgctcccgatgtaacaacccaattaatacttcggtattatgctgttttaaaaaccgacaaataatactgacccagaatgccgctatttcataacaataagcaggattattaatcggtagaatcaagactttatttaaacggctagtcccattttgtaaaattggttgtagtagtaatcctaaaccaatcatgctttgagctaactcataaatacttagcttcattaactgagcaaatgaatgcatggtatgattttcataaaaacctacacattcacgttcagataaaacctgaatttgatttggtaaatgatttagcttaccaaataataaatcagaatctttaatccctcttaatgcacgattattttgaaataaatcaactaagacatgcttatagctataaggtgcatatagtaaattttcatatggtaaatcaatctcaagtaaatgactgagtaccatcggaaaagctcgacctgaactgtcttcgctcgccaacaaattagcagccaagaacatgttctcttgtggatttgcaataaagaaatccaatgaaggcaacttgctatatgcttctttgaacatatttgactgcattgcatattccaatgcttctgttatccactgatcaagtacctgtattaaggcatattgaccttttgtctttaagaagtcaccacgtgcagggcttttcccgtaatacagaggagttgtttttaatgtatgcatcaatgctcctccttgaatgtagaggttagtttccatgtcatggcttaactcccgcagcaggttgtgctagtgcagaaactggattttcagttttggcaggagcagctgcctgagctggtgcttgctgtgcggatacaacgcgagcagccttatccgcagttactttgtcaaccagttgcataccagagtagccacggcttgaaccgatacttcctgaattactactaataagacggaagttcattttcacaaagagtgatggatctgtcttactgcgccaaagcatttcaaaaccaccgttttgctctttacgctgtgcactatcgattaaacggttaatcccgtattcgcctggttcatcaaaaatggtatgtgtttgaccttgtaaatctacagccgtaatacgagcacccggaatactgccttgatttggccaaataaagttaacccattgctgcaccccattttcataagtcatacgctgaccatcaatatcaacggtatatgaaagtaactgcgggttttgaattgggtagaactggaagttagactgattagttgccggagcagctggtgcttggctatttaactcacctgttgccattccatttgtaggtgcaacatagcgttggaagttcataacaaattgtgggtttaaactaatccccaaatctttccatgttttggaggttaaggtataaccgcggcggataacaaacgggtctaaactctctttaacaaaacgggaaatactgccgttctcaccaagaatttgtccaatttcactacttgttgcttgtaaagaagctgatgagttaaatggatatttcttagcaagatttgcagtaaatggttgataggcttgcattacccatagcttattaatttcatcttgagtaggtgtaattaaactttcaaaggcttgggtaagtggactcaccactaatttttgtagaagttgctgatcaatttcactgaaaccaaccgccatcttttcatctacaattttttgagtctggttaaataccgatgtctgctcatttaaagtttgcttaaccaatgtcatcgcattcggtccgatctcacccgcattcttaagttcattaaacttactacgtactaaggcaagattcgtcatatattcatcaagcaaagatttaccttgctgatcatcacgtttacgaaccaattgatagaacatttgatattcttgagaaataggcccttgagcattcgttacagcctgatttgctaattgtttatcatcatggtttaaaaccttacgtttaaaccatgcaataaatcctttttgaggcgctgctaactctgcttgaacaaccggattatcccagtttgtttcaatggctacgcgttcaataagcatgcgaattggtgaattttgtggttcgcccaatacatcaatatttttaacttgctgagcaaactgagttgcttttgcatagtgaatgccacttaagaattttctccactctgcaatatattcttgtttatacaatgcagtaagctgctttctgatttgctctggactacctgagaaagttaaatcatcagattgacggctattaagcacccagtctttagtatccgtaggtttgtctgctgcttcctcaattgctttttctacatactcgttccaagctttttgagtaaatacccctggtaatgcataactacccaatacaatatttttatttgcgtcacctacaatctggtttacagttaaagctggaaagcgcacagcagcacgcattttaatttcattataaacacggtcacgtgctggcatacctctaataacagagagcaatacttgacgtgtctgatccacgagttgagagtcagcatccaagatcgggaattgtttatcatttgccaatgtcattgcataagataagatctgctcagcttcttggatcatatctgcacgtggcatctgccctttattggcatcaagccaagaacgccagaaacgcgttacctgatcacttaagtgacttgcatccatatactgtggattgctcatcattaaatatgcttttaaagcattataagcatcttgagggttggtatccgaaggctctaaatattgctgagtttgagcagtttgcttgatctcaacattggtatgatttgcttttaaagttgcttcgttattttttacacgttgcaaatactgagcaatattttgctgtgtaggtatcaaaacaatttgcttaacaccttttaaatattcagcttttaatttttcacgtagctcattaccttgatataaaccaaaactaaattttagtggtctattttcatcaaattcgtctaactgttgtagacgtctttgcaagataagtaaggcctctaattgagtcgacaattgttgacctgaactcttttccaattgaacaactttattcaaatcagcttgaacttcggcaataagttgttgattattacgatatgaccaaacccacacaccgagaataatggatacgcctgctaaagcaccaataaatgcaatataacgctgacgctttttgcttgtattgacatgctgtttaaccagatctttatcttttaaaatgacatctgaaaacaagccttttaagaaataaccatggttaggcgttgtttttagctgatcttttacttcactttgagcaatttgggaaagctggaattcctgtgcaatttgctcagtcattggactttctattacgccttcttgcaaagcacttgtgaaataaaacccacggaaaactggttggaactggtaagggttatcttcaaacaatgtcgcaataaaactttttaatgcaggttttaatgtcttaaattctaatgggaaagtcatcacactaggtgagatattttgagaatgtcgacggctaagatgagttgaactgaccccttttaaaccgtcataaagaatattgtagtgtttctcaaaaagatctacagcattatgagaagagttttgctcatatggtagtgttgcgccccacgcctgattatattcttgtgcttcatagaattcgaaaaattcggtaaaacccgcgatcaaatccatttttgaaaagactagatatacgggtacaaccacttctaaacgttcggttaaatcctgaatacgagcgcgtaaatttttcgcaagctttaatgagtgttcaggactctgactaacaagctcagcaatactaacaataagaattaaaccatttactggagccttagaacggttcttctttaagatatttaaaaagcctaaccattcagagtggtcttcgctatagaccgaataacgtccagcggtgtcgagtaaaataccctcagtcgaaaaaaaccagtcacaattacgcgtaccgcttaaaccagccgaaaccattttttgatgggtttcttcaaaaggaaactttaaaccagaattatagatcgcagaacttttaccagcagctgggttaccaatgaccatataccatggcaactcatatagtgctgcgttcccctttttatcgcctaactttgacttacgaatcaattgaatagattctttcatttgttggctaataagttgcagctcttctttatctttatttttgccgtactctgcttgggtatccttttcaatcgcttgtgcaagctcttcaccttgaacagcatgctttttacgctgaattagccaataaattccataagcgatgagccctaaagcatatgcagatgctaaagcccaaaatatatggcgaggaattgaagtataggaagacatcaatgccacgaacaatgacaaggcgataattgctttaggattcgtgatgtactgccacaagtagcctaaaattgtatgcattctattctcgttctaagttcaaagtttaaattagctattcaacaccatcgcatcatcttctgaattttcagtgacactctgcacaaatgtatgtgctgacactgtattttctccaaagacaaaaggaacgatatgttcaggaaaatgcatactaagcataaagccataaatatcaactaaatgctgggtatgccccaatgaagatttcacataaatatagtgatgtggttcaacagatgtttgtgcaaactgctgctgtaattgcttcgctgtttttatatctgtctggtctgaaagaataagtacgtatggctcatctccctcatactgcggtaattcatttaagttcagcgtatgaagaactttggctgctttttcttggcccaccacaatttttaagtttttagccggttcgagttcttcgatttttaatgatgggtccgcaaggaggcagcttgcagcaaattcagccggaatataatctttgaccatccatgatttttcatcaataagatcttgatcaatctctgaatcgacagccagcatgagaaatacctcatgctctttcttttgaatgcgttttaataaatgaataaattcttgataagctacacgctcacccaaaaagtgatattcgatatgaactttttgggaaataataccaatctcagtaaaaaactctaaaatcagatcattactttgctcatcattccaaacatgtaataaatcttctggaagaaaaatatgcaaattcagtcgatttaaacggtgtacttcaactacgggtgtttccacatcttcatattcgctatttggatcgacccatgcaggatgcatatgatattcacggatctgatgagattcataaaataaaattgagcgctttaaatgttcagccaagcgatacaaattctctatattttgttctagttgttgcctgattaaagacatgatacgaacttgtcttggtgaagcagcgtattgaatatcctcatcatttgtctcagctaaatctttaattcgataagataaaagaggcaatccatacgaattcaacaattgctcatcaagctccggacttttaaaattttgtatttcttcaataatagtttcattctcgcctagggcatgtatagcaaaagcggaatatacattaaaatccagctgttctagaggttgttcaattgcagcagatgatttttgactatcatcatcttgactttgatttgcagcctgctctttcttttctttgtagcttttataaacactataaattaaccaaggtgataagatcaccaatgtaatgattgctggcaataataaaaaataaaggaaaaagtcgattttatttgggttatattgaacatcacgccagtagaaaatgataattccactaacaactgtaaaaatagcgatgaatgagagtaatatttttttaatcatatttgctctccaataaggctataacatgtttcatcgttatgtgtattaggcttacgagacattaaaaaagcgccttgccctaaaccactttcttggccttgagttaagcgaacaggttgtatttcagtctcatccaatatcaatcttaaatctatcgataaagttggactgcaccaggtttctacgatttttttgagctttaagctaagctcttgatgaggtaaaaattttaaatattgctgacgcttaagcggacctatttgaatctcaatttttccatcaatttgttgaatcgtttccccacaaaatgtgttaataccaagtaagctcggttgacttccgcctaaagtggttagctgatcacccgctaacttaaacgattcctgtacaaactctttaattgtaatttcatgcttaaaaatacaactcaacatcgtctttaaagcatgaaccgtattattttgcccctgcattaggcctgaaaattcagcgaaatattcatccaagtcttgttgctgatgttgtgagcgaacataaccattcaatgcatggagaatatccaaataatcatttttattttcaatttcatagcgcacaggcaagtgataagtaatacttgactctacatactgactggtcagcttatgattaaataagcttaaaaactctttcgtttcagcgcgttgttgccttggagcctgcttaattttatttgtatatgtataaggtaatgcaccttgtataccagtcagaccaacgatcaggtttgttaaatgaacacgttcatctactaactctaaactttcaatttcagtggctggaaagtttaagttaaatgaggtctcaaatttaaaatggtcagaccatgataaagctgcgtcattggcaggcatatgacgcaataaacgtgttgcttgaataaactcaaaagacttagggcgttgaaacaactcagccgttacagaagagtcttgccaccaacgttctgactgcattggtataactcctgctgagatgaataatccttaaccaccaaatcaacaaaactattaatttgaacctttaaattaaaaacacgacttaataactgactaaaaatatataagctatgccctctaaatacggatgaatcaatttgtaattcagcttttactcctcttacaaacattggaaatggtttgccatctacgagtttatgggtaagagaaaattctaattttttaattgattctataattaaatagttttcttttgactgcggtaagttatataaagccagcagctctttaacatgagaaacagcatcccctttcataagtgctaagctatttaatgaaagatgcgagatcacacgccactgttcactttggccttgttcaaacttataaggctttgtaggtcgttttaaaacaatggcacgtctcgccaagctactatcatttaaatttaatacgttattagactgacccagtgcttcatgaggtaaatcacggtttgaacataataatttagtgctaataaaatctgagcgcgttgaaaatggatttaaatttttagaaataatcgaatagcccatttcaacgaaattggactgtaacttttgatagtttactgagtaaaaaaagcgagctgtatcattgtggtaatggctcatcgcaaaaaaaggcaaaacaggaacatagctttcttcctgatttgttttttcacgcaccatattcatctcaagtattgaatatacttgataaaattcaggatggtgagcgtctgtaactaaaggatattctaattgcttgtgaactatcttctggggttcagcatatttttcaaataaattaattacgggggtagtaaataatttaaagtttgcaatatttagctcagaatagtttctaacaacggcttgatcatttaagtttaatttgaaatgaattaaaagctcaaattcggatacatgctgaggtagtcgccttaaaaaatccaaatcgagcttaagataactaaacttttccgggaaacaaaagtattccatcaacaaacgataagcatgatgggtatgttgatcaagcggtaataaactttcttgttctgcaaaaccaatcaattcaaatggattcttgctcaattctacaattgtttgtccatatttaaccgcaaaactggttccttttttgaaaatactatcaaggacctgtagaggaaaattagagatagcatccaaataaataggaagcttctcatcagttaaacaagcatgagcattattaaaaatttcaaatttaaggctcaacgtcgcattttgatttaagtgcatatgtgcactaggtgtagttttaaaatctaaaccacttaaatgaataggtagtaatttaacctcttgagttgtattaaactcacactgtactcctttgaaactacgagatttcaaaaccgtatgatgaggtacaagatgaggttctgtaagctgtttaatcttattaatatcttcaaagctaacaactgaacacgcaggaaaatgccgtaagtattgagggaacatcacctcaaataaagaacgagtaaaaacatcgtaactgtctgttagttttttatcgattcgagcagcaatcagcgaaaaagcctgaatcagacgttcaatatgtgggtcatcaatttgctcttgatttaaagataagcgctgagcaatttttggatatttttgggcaaattctcgagattgttgaccaaattcttgtaattgtttttcataaaacggtaaaagctcttctatcacaacacacccactacgcttaagttcttgctgaaattacatattgctgcgttgttggttttaacaatgcatcaaatacaacaggttcatataaggggtgaatatttagataagcctgaatacttaaacataatgcgcccatattatgtccatctaataacatctctacccgtatttgtcttagccgaggttcatgagctgctattgattgctcaatggattggcaaattttatcccgatccagagggttggctgtagaaagccccacaaaatcaataatcccgaactgaagtatcgatttttttacaagtggatagtcatcaatcacatgatctaactttgctacccgactattgagcaaatcttctaaatcctttgctacagattctcttaattgctgaatagaaagaccttttgcataatcttcactttctggaattaaacgatcaaataaagttgaacgaaatccgtatggataaagccgatctaagttcattcgagttcacaacaaagtatatttaaagacagcagaggctaactttatgtcagcctccaccaaatattcacttaaataattacgctgcgtaagaagctgtattattagaaagtgaccatttcttagtaacagcacctttagcagtaccgttaatatcttgttggttataagtccactcaacagcagcatatttcaaaccgaatgcttctgtaggaacgccttcttcgttaacagttggagtcacactagaaactaaaacgtgcttcaatttgatttgtaagtacttgatacgtttatcgccatttgcgcgatagaagtcgatttgtacttcatcaaatgtataaccagctgaacaagcttcccataatttagggctagttgcgtctaagtctttcacgaaaaccatgtcagaatgttcaacacgttcagcagtgtggccgcctacactacttgaagtagcagatttaggttgacggatgttatgagaccaagagttaacttctaaccaacctttgtgctcagaatcacgagattctccatcaactttatatttaccgcgaaactcaacgtatatatctttcatttagaactttcctatttttaatttaaagttattctttagctgaccttgattaatttgaggactgaggtaactcagtgacaagtcgtaaagaaaccgacaactcatccagctggaaatgtggtcgcaagaaaaccacagatttgtagtgacctggttgagcaggatcttctacaacttttacagacgcttcacgtaacgggtattgagcttttgcttcttgagaagcaccatcgtcaagtaagacatactgtgacaaccactcatttaagaatgcttcaacatttccagcagaagcaaagctacccactttatctcgcatcattgcttttaagtaatgtgcaatacgtgaaacagccatgatgtactgaatctgacttgataaagccgagtttgcattggctgtatcattgtcatattttttaggtttttgagttgattgcgcgccaaagaaagctgcgtaatctgtatttttacaatgtactaacggaatgaagcctagatcgcttaactctttttcacggcgatccgtgattgcaatttcagttggacacttgaataccacttcgccatcttgtgttttaaaagtatgtactggcaagccttcaactaaaccaccaccttcaacaccgcgaatagcagcacaccaaccatgcatatcaaatgcatttgttaagcgagtaccaaaagcataagctgcattcatccacaaatattcattgtggttttcaccagaaacatcttcaataaaattaaagccttctgtcgcagtaccttcttttggatgatatgggagacgacccaagacatgaggcaaagtcaatgcaacataacgtgagtcttcactatcacggaacgaacgccattgaacatattcagcggtttcaaagatttttgaaacatctctaggacgatcaatatctgtaaatgattcaaggcctaaaatgctcggactagcagctgaaataaatggtgcatgtgctgccgctgcaacatgagagatttgctcaagcaaatacatatcagatggagtacgatcaaactcaaaatcaccaattaatgctgagtatggtgcaccaccaaaagaaccgtattcttcttcgtagattttcttaaacaaagtgctttgatcaaagtctgtagcaccttggaaatcttttaccaactctttcttagtcgtattaagcatacgaattttaatgagcggatttgaaggcgtttcctgacaaaagtaataaagaccacgccaagttgactcaattttttggaattgttcattgtgcatgatctgacttaactgctttgaaatcagagcatcaatttctgcaatacgcttatcaattgataaagtcatattttcagaaacagtaatggtccctgccattacttctttagcaagctcaccaattaagcttttagcacgagaatgttcttcttcatttcgtgcaatacggctttgttcaacaatcgaatctaaaagattaacttcttcattttcaacaagtggcattgctgctgattgagtattattcatgatcggcctcggcacttaatttacggatttgatcagtatttttaagaacctcatcaagcagatcttctaaacgctcactgtttgaaattttgtttcttaaatcggttaaacgctcacgcgcctcaaccaatttctttaatggatcaacttgctgtacaacattttccgggcgaaaatcttccattgacttaaacgttaaatcaactgccattttaccgccttcttctgtcaacgtattgtctacttgaaaagcagctcttggagacagagattccattacttcatcaatattatctaaatcgacattaatgaattttttatcttttaattttgtacgctcaagctcagatgcagctgaaaaatcacccattacacctacaacgaatggtagttctttcgcttctttcgcatcaccaatttcgacatcatatgtaagctgaacacgaggaggtcgaattcgctgaagcttcttttgtacgctttctctcttagccataagattctattccggattatttaattaaagggtcaaaaggcgaactttttgatttattgacagtggctgcaggtgcagttttaggtttgactgcggtggcctttgctggacttactactcgtttatttgatgttctagaggcactcactttattacgcgttgcgtactgttttttataatttcttttttcattatcagtagaactgctttccgagttgttagttttgaaactggatggatcaggagccggcattgcagtatgaatattttcaactaactgctttgcaggaggatatgttatgtcattcgttaaatatcgcatttcctgattacgcatttgttgcaatgagttatttgcaatgctcacaccagataaaaataagacatctgtgattaatgaaccgcgtatattttgactttgcaattgacttgctaaattcaatgctttaactggttgattggtttgataaaaccgcatagcagctttagctaataaatcatttttttgagttgtattatcactatcacaaacttgtttaaaaatattcaatagctcagggtcattttggccttctgctagagggttcttcttaatacaactttttttaagttttacaggctctagttctgctgcttgagcatatgatagaccgataatgtttccagtcaaaaaaagtatcaaaatacttcgtttcaacacaactttcattcctctgttttcttatttattcaaggctttaccgaaaagttaatatttttagaatattaaaaaatcagtataaaaaccttatattcaaaaaatttagtcgcagtttaacatataaataaacatattttatataaaaaacatattaacttaaactaaaagctaatagttaagatgcctataaaatatagcttaataaagtttttcttataaaaaaataatattgttaatttttgtaaataaaaataaattattgatttttattagtttatttaaaaattaaacaaaattaaaaattgatttaaatatcatgagattaggcattatgaaacattttcttaagaatatttaattataaaggacatctaagttaatcctatttgattagtatcgatacagcccactttacaaaaagacaggctctacataaagtccataaaattgtcaagactaatctgtctacctatcatatttttttaaaattaatttaatgcttccttagcactaaaaaacatactttccctacataaccataaattttctatattttttgcttaaacatggctttagataaaaattacaagtaattatttttggttcttgtaatggctcagaccaagagaagtttattcaacctaaattttattttctcaaaaattgtagttcttaactttatagctcatatgaattaccaattttttcaaagaaattaatactacccaccagtatccaaaatatctggctattttggctgatatagataccctcatagctataaaaaaagcaatatttttaatctgcgaattaatcatgacttgaataacaaatagattggttcatttatgctgctttatacaaaaagtacattgttggcaatgattagcggcagcttgagcgctaatataaatcaaatcaattcatcgattgattgcataggttaagattgttagaagagaatatggtctgaaatattaatcgataaattttatttagtaccgtctatacatcacaattccactattaacatacttttttaattgcagctttgctctgcttactttcactcattcccgttttaaaggagaaaacccatgtctaatcaaatggatcaggccattcaaagtgtcattgacttacatgttttgatcgaaaatgtttttacaggtcaaaatgcagaacaaagtctcacaccacttttaaacagttttgatcaaaattttaagatggttacggttcaaggtcagagtattggtttagccgaagttaagaacttatttagtcaaaatattggaaaaaagccctctttaaaaatcactattcttaaaagcacagccttatacgaatttgaaaattactgttgggtgcaatatcaggaacatcagcaaactgatgaaaccgaaacagtacggacttccacagcctgcattaaagtagaagacgaaaaatgttattgggtttatttacatgaaactttagttccctcatcttcttaactcatctagagcaccttaaagatggcacctattttgcttaacaatattacgttttatgaaaatcgtaatactgatcaaaatggggagctctcgatatgggttatgttgcaaaggaatttacgcaaaagaacaagctgattctcagtatttgttctttcgtgattccaatatgtctttggtgcgcaatcagttacttaccttttgtttggcatcctcaagtacaaatcacaagttcaggcagtgttccttacttacaagtaggaagtcgcgttgataaaaatgtgttctatctcgaagcacaaaatgcagtcaatcgaaattctgcaccaccacaaggtattttggttaatccaatttatttacccgctccccatgaagtcgctaaggctttggtcactgcatttaccacaccacctgaacaacctgattcgccgtggtttcatcaaagtttatggcacagtattaaactggtattttcagctttttttatctcttccttaattgggattccactgggtattttgtgtggtttttctaagcggatatccttgttaacagaaccgtttgtcgagtttttccgttacttacccgcacctgcatttggtgcgcttgctgtggcaattttagggattaatgacgcacctaaaattgccattattgtgattggtacactctttcagcaaattctcattattgccaataccacacgaacggttgatcgaagcttaattgaagctggctatacgcttggcaccaataagctcaaaagtttatttcatgtggtgattcctgctgccttacctgatatttaccgtgacttacgtgtgctattgggctgggcatggacctatttaattgtttcagagttgattggtacgacctcgggtattacatggtttatcacccaacaggcacgctatcaaaactttgacaatgtctatgcggccattttgattattggggtgattgggctggtctgtgattgggtattaatgaagttaggtgagcggatgttcacttggaaagtaggagcaaaataatgaacgattcaacatttaacgcacatgaatactttcaaaaaatttatgaacgtcctgtgattttagaagctaaacaactgagccaagtttttaaacatggtcaaactgaacatactgttttaaataagctcgatttaaaaattcataaaagagaatttatttgtgtgattggtccttctggctgcggtaaatcgacactaagccgtgttattgcaggtttagacccataccatagcggagaagttttagtagacggcgaatgcattacaggcccatgtcctgaacgcggtatggtgtttcagggctataccctttttccgtggaaaactgtaaaagaaaacgtaatgtttggtccgcaaatgcgcggcgccagtcaaatgacagccgaagctcaagcacgcgaatggatcaatattattggtttagaaaaatatgaaaatcagtatccacaccaactttctggtggcatgaaacagcgcgttgcgattgctagagctttagttaatcaacctaaaattttacttatggatgaaccttttggtgcgctcgacccacatactcgccaaaaaatgcaaaagcacttaatggatttatggcaaaacattgatatcaccattatttttgtgacccatgacatggatgaagccattttgctggcagaccgaattgtggcactcaaagccaacccaggtgaaattaaggaaattattgaagttaatttacctcgcccacgctcactcgatttaatgagcacacctgagtttaaacagctccgttcacgagttgattatctggttcacgctgaagaagacgagcttgaccctgcgttgcaagacctaccaaaaataccgcgtatgactcaggtcagtacagaaaaataagtaagacattaaaaagcccaagttcaacttgggctttttgctttatggagcttatttgagttgttcgatgagtgttggataaatcagcccatctacattttgttcagttttataaataccgttttcaacgttaaatttattgacgtgatagctagagccataaatcgagtcaaagtcttgagatttagtaaatacttttttattggcattgatatctaataaatgcgtaccgctgaccatcaactcatattgctttggatcaacccctgaacggtttgccataattttaaccgcatcggcatgggttgcagggtcattaatatatttaactgttttatcccacacttgaatgatttttttccattcgtcttgatgagctattaaatgactcatgttgactgttaaggtgtcgtaaattaaacccggcttgtctttagaggtatagataattttagagcctgccactgcttttaatgcctgccctgcaatgggttgccaaacagcaatcgcggaaatatctgggctattaaacacttgaggtagttggttcgtcgctgaatttaccagcttcacctcattcgctttaatgttatggtcggttaaagctgttgccaataaaagatggtcaaccaagcctttttcgacaccgatcgattttccttttaagtcttgaatggtattaataccctcttttgcaataatgacatcattgcccgcagaataatctgttgccatgatcatcatgccttgcgtaccgcccgaagctgttaccaagttatcgccattggtgaccaacacagcgtcgagctgatttgccgaaaaggccgaaagagaagccgaataatcaaaccatttaaactctacatttagccctgcttcttttaaccagcctttttcaatagccacttgccaagccacccagcccggccaatcactatatccgatggtaattggttttgtatttgcggctgcctgagcatcttgtttagcctcggacactttagcagtattgtcacacccacccaatacaactgccgataaaatagatacggataacaacgcttttttaatcatatagaaacttccccaacatttttactaacaacactttgagcggtttgattgagtgactgtatataagctcgccagcctccaaaatggctaatatcggttgcatcttgaatggcataagcctcgcaaataaagcctttgacccatgttccatcttttagtttcaggttccctataccaagtggtgctggaacttcggccacaatggcaccaaaatttgctaaaggaacatcccacacttcgacttcaattgatgtccctgctgcatcacattgcaggccaggttttggtggcgaggtattttttaaggcaaagagtttataagtctctgcggtctgggttttcttaagtaaagttgcattgcggctagtgagctgaaaattaaggggcatgcctgttaagtgtgctcccacaacggcaagctgtactgaatgattcgactgaatctctagacttttttgataatgttgagttgatttacctaaactcagcgatgtttcggcttgccaaagctgcgcaaaattggcgagtgcctgatcgtgccaagctggtgcaataaaggttattccacttggtaggccgtcttcacgaagtatattaggtaaagctaaagccgaaagatcggcaaaattaacaaagttggtataggcccccatgtgcgcgtttttagtcaacgggtcggcttcaacttcggcaatggtgtaaatggttggtgctgtcggaaccatcaaggcatcaaaaggctgtaatgccaaattaatttttcgagccagaacggcacggttatattcggcttgaagtgcatctgttgccttgaatttatctgcctgcgcaataatctgggcaatgactggatgagccttttcacgtgttgtcatgcgttcaacggcgactgttctttctgccacccatgcatcgttatacagtgcggcagcaagctcattaaacgcactgaaatcaatactctcaacttcgtaacccagttttttaacacgctcgactgcaactaaaaaggctttttcagattcaagatcgccataaaactcaagctgagctggaatagctatttttcgtttagaaaactgagtcggtacattggctggatgtactcgtgaatattcatctgtttcatcgtatccctgcattaaactggcaactgtccaagcatcatcaatatgcagcgcaaaaatagaaatgacatcaatagtccgacatgcagggattaaacctgtggtagaaaaccagccctttgttggtttaagacccacaatattgttatggcctgcaggaacacgccctgaccccgccgtgtctgtccccaaactaaaaggcactataccgttggcgaccaccactgacgaaccagaacttgaaccaccgctgatatattcggggttaaaactattttttactgcaccatagggagagcgaacaccaaccagtcccgttgcaaactgatcaaggttagttttacccaccacaatcgccccagcttttttcagtttggcaacgacggcagcatcttggtttgctaaatattgaacttctttacaggcagcagtggtgtgaaagtcagcgacatcaatattgtctttgactgcaaatggcactccgtatagaggtaagtcagcaatattctgatcttttaaaacatcaatttgtgcctgaatctgattattcgatgcaatttcaatccatgcatggtcatcgtttttaatttctgccacatagccaatcagatctgcaagatggatttgcccgttttgatatgctgttttccagtcttgaatagtccataaatttttcaacacgctactcctcatttagtcattttgctgtataggcggcataacggcatccatcagttctagatgtcctttgatcacccctttcagcacaataaattgctggctaatttgtctaagctcagaactcgcgccctgcattaacatgacttgcaatatcttttgttggtcgagctgaatatgaagtgaactaatcacctgtgctaaaaactgttgttgcaagtcaaccaattgattgcgcaaggtcatttggctagcgtcataaagcagcgttaatgtgcccaccatgacttcattggcctgtgcttgctctgcaatcaggtgtttattaatcatgtcgacaatggcttgcgagcgactttcatagttctgctcgacaattttttggtcgagcgcgttgagggtcgattcaggtacggtaatactgattcgagcaagcttttgttttgccacagtcttatccttttgttttaggcagctgattgttttgtttgatatatacgcctgcgcgtacgctgagcaactggactaaaaaggcttttaaagtttgctttggttgaaccacaggttttacatcgttcatatcacacctctagcttggtattaccaaattcagtttttgtattactaataagagatgcagaaaatgtgccagtttttaagcgtggttttgatgggcttggtaggaatttatgagtgatttttgggcaagaaaaagccccatgcacagggatggggctatctcttttaatccttagttatgtttcaataaatcattctgattaaaaaggaatccatctttaggagcctctatctttatattatttattaaacttttaaaatcattaatcgctttatttgtatcattaccttcgccttcatatgttactaagataactccagcattagtacctgatgaagcactaataagaaaacgtttatcaaagttggttgtaaatacattagcttgataattcataccattactcaatggaatattaatatcctcattaactaatgttacccctttcattttaactagtccttgtttaggaatttgtagagaagcaaccagatattgcataccctcttctatacctttgggataatatattgaaattataattgcctgtttactcgcttgttttattgcaattaactcttcattttgacctttgctaatatcccactgatcttttaggttaactacaatatttttatattttacttcttgagcataagtcggagtaagtaaataaaaaaacataaatgttagtaataaaattcttttcataataattccatttttgttcttgaagtatcatattaaatatcattcacggagtcgaatctattccataatttaattttgtctttaatcttatggctaattaatcatcgtatgtgcccataccgataaagactctaaaacaggcttaaaagattggcctaattcggtcatttcataaaccactttaatcggtgctttttcaccataaacggttcgagagattaagccactttgctctaattacttgagttgcaggcttaaggtcatttctgtaatggttggcattaattgattgatttcattaaaacgttttggtccatcttttagataatacaaaataacacctttccattttccacccactaaatccatagccatactgatatgacatggatacgtttttccattcatggtgatttcacatttattttcagtatttgccatttttaacgccacctatcaactttgatagttattgtacgctaatactataaaaattatagtgactatgatttttatagtttaaaggcactctcatggctttactgattttagctcatccctactacgctcaatcaattgcaaataaaacgattgtgaatgaactcgtaaaaacctatccggaccttgaagtgcgagatattttccagctttatccggactataaaattgacgtgagtgctgaacaagaagccttattacgccacgacacgattattctgcaatatccaatgttctggtttaatatgcccgcaattttgaagctatggtttgatgaagtttttacttatcagtttgcttatggctctcagggcgacaaattaaaagataaaaaagtcattattagtatgacggtcgggcaaaaagaagcgaacatggtgaacgaccaagaaaacttaatcgatagctttttaaaatcagttcaacattcaattcaatatacgcaaatgcagttaagcggcacatttttgctttatgacgtatcgccattatcgggtaacccagagtcgaaaattaaattagaagctgttgaacatggccataaagtattaaaacatttgaccgaagcataataaaaaagagagcatcaatatcgatgctctcttttagtttaagcgactggtgccaaagtaaatagcacttgtcctgtttttacggtttgtcctttttcaatggtaatggtttctactttcatgcgttccggcgcaataatcggaatttcaattttcattgcctcaattaccgcaagggtcgcaccttcttcaacaatatctcccgatgcacattcgattttccagattgaccccggcatgtgtgattcgactgcacagcctccttcaggaataaccacggtttcaccttcatcaacagcatctaggctttcagagatatattcttgtaagcccgcttcgtgccaacggcggcgttcagcctcaaaattggcttgttgcatatctttaaaggcttgaatgctatcttgatgtgtttttaaaaactcgttgtattcttttaagttaagcacaccatcttcaatacgaagttgtagtcggcccgccttaaagtcttcacgcatttgtagaagttcagtctcagaaacttcataaaacttaacttggtcaaaaaagcgcagtaaccacggtttgccttcttcgaagttggcatttttacggtaacggctccacatttgggtcgtgcgaccaacaaactggtagccacccggcccttccataccgtacacacacatatacgccccgccaatgccgaccgcattttcaggtgtccaagttcgcgcaggattatattttgtggtgactaaacgttggcgtggatcgagtggcgttgcaacgggtgcacctaaatacacatcgcctaaacccatcaccaaatagtttgcgctataaaccacatctttaactgcttgctttgaagctaagccattaatacggcgaataaactcgacgttatctgggcaccacggtgcatctggtcgaacaatttgtgtgtagcgctcagttgcaagttgagtctgcgaatcttcccaagccaaaggcaaatagacagtccgtgaaggcacctgcatattttgaatatcgggtaattcggcttctgcctgttgaagtttctgtaaaagttcaagttgatcgagctggattgaattaaaatgaatctgtagtgaacgaatacccggtgttaggtcgataataccctgaatgttttgatctttaacccattgcatgagtgcatgaatacggaaacgtaagtttagatcaagtactaactcgccatattccaccaacaaatagctatttcctgctggtcgataggtcacgcttggtaaaccagcgtcaccgtctaaagtagctaaaacggcatcttttaaagtatcgggttctgcttgaatagctggattaaaaccgatctgagttgtatcagtcgcggttaagctttgataatatttttgatcgagtgcttttgcttgcgcataactcacgggtacaaatttgaccttgtcgcctgcttttagctgcccgattttccaaagctcggaatgaatgactaccgcaggacaaacaaagccgcctaaacttggaccatctggacccaaaataattggcatatcgccagtaaaatcaattgcgccaatcgcataagcattgtcgtgaatattggagggatgtaagcctgcctcaccgccgtcttcacgtgcccactctggttttgggccaattaaacgaatgcctgtccggcttgagttgtagtgaatttcgaactcattggcaaagaacgtatcaatatcttgtttggtgaaaaaatctggtgcgccatgtgggccatacatgactgcaatttcccagttttgggtaaagctaggaatttgcgcttgagctaaagctgtagtcgattgagcggaatattcagtaattggcaacatatcgccaattaatagattacggcctgcatgcccaccaaactgccctaaagtgaaagtcgcctgtgaccctaaatagtcaggaacctcaaagccacctttcacgcctatatagctacggcaacctgaacggataatcccacattttaaaatctggccttttttcacattaatggtttgccacatcggcacaagttcgccatcaagttttgaaggcatgtcaccacccgtaatcacaatttggctgtcgcagtgaaactttaaagttggcccttgcaaggtacattcaagccctgccgtatttggctcattggctagaagctggtttgccaccgttaaactgagtggatcgatggcacctgatggcggcacaccaacatcccaataacctaatcggcctgttacgtcttgaatagcagtttgaataccagcctgcaacacctcaattttttgagttttccattcaaacgtatttaaaaatcgagtggtttgagtacctaaagcaaacacatcacaagcaataatgttttgcaaatattctaaattggtttcgatgcctgcgacttgcgtgttggcaagactggcactcattgcctgtatagcttggtcccgtgttgcagcagtcacaatgattttggcaatcattgggtcataaaaagacgacaccgttgaacctgtttcaacccatgtttcgactcgggcttgcgggtcaaatttaacatgtgtaagcaggcctgcactcggctggaactgtttaattgggtcttcggcataaagacgaacttgaatagaatgtcctgttggctctaacttttcagtcggtgcggaccagtcaccgcttgccaaggtaaccatccattcgactaagtcgacaccaaacacttgttcggtcacgccgtgttcaacctgcaaacgcgtgttgacctctaagaagtaaaattcttgggtttcggtgtccatgacaaactcaaccgtgcctgccgagcgatagttcaccgattgcatgagttgaatcgcaactttttgcaagtagtcgcgttgctgttcatttaaatgtggcgcgggtgtttcttcaatgactttctgattacggcgttgtaccgaacaatcacgctcacccaacgctaaaacttgccctttcccatcaccaaaaatttgtacttcgatatggcgtgcatgttgtacaaatttttctaaatataaacctgcatctttaaaattgacctgcgctaaataagatacggtttggtaggcatcttttaattcagtttcattccagaccagacgcataccaataccaccaccgcccgcggtacttttcagcatgactggataaccaatacgagcagcttcggtcaaagcctcggcttcatcggaaagtaatgagctacccggaagtaaaggcacattgcttttaatagcgagttcacgtgcagtatgttttaaaccaaaatccagcatttggcttgaagttggcccaataaaggcaataccttggctttcgcacaaatcacaaaactcggcattttcagacaaaaaaccataaccgggatgaatggcttctgctcccgactgtttagcaacctcaaggattttttcaatatttaaataactttgatgtgcaggtgcagggccaatcagaaaagcttcatcggccaaagtcacgtgtaacgagtcacggtcggcctcggagtaaactgcaactgaagcgatcccgagttttttaagggtgcgaattacgcgacaggcaattgcaccgcggttagcaatcagaacttttttaaacatgcttacaccccttccgcttcacggacaaccagttgaattttggttgggttataggcattacatgggttattgagctgcggacaattggaaattaaaacaattaaatccatttctgcccgaacttcgacatatttccccggccctgaaattccatcatcaaatttaagctgaccgtctggtgtaacaggcacattcataaaaaagttaatgtttgggccaatatgacggacatttaagccatgcttttttgcaatcgggtgttttgccaaggcatacataaagttgttacggcaactatgcattgggtaggtttcatgtgcatagcgaactgtattactttcacaagaacaagcaccgccaatggtgtcatggcgcccgcagttatcatcatgaataacggctattggacggcccaaattactgtagagtttggtgcccttttctaaatagatttgttggttgatagccaaggtatccattgcgctataacgctcagtcgggttttctgcactcataaataaagtatcgactgcttggtttccctcaaggtcaataattcgaaaatattggccttttttaacctcacacatccacgcttcgccagcaggacaaacttcatttaaaactgctttttcaaatgattgtaaaactgtcatgatgcttctcctgatttaaatattgctaagtgcgtagtagcgggctgtgttttgaaacgcgcgctgattttgcgaacatgcatcacgacaaatatcgctgtctgttagagaattggctttaaataaactgatttgaatatcggcgggttgatagattgggctggtgtctaaaccatgcggcgcagcagataaaaatactaagcagtccatttcaaaacgtagttcaatgttttgattggtgttatcagaactgacataagacaaagcgccgttttcatctggtgcaactttagaaaataggttaaccgtggcactgagatcttggctggcaagtccatatttacacatttcaatcaataagctgtctaagccgttttggtacatatcattgcgggcgtcttgaaatgtacgagtaccgaattgcttttcaatttgttctggtcggcttgggccacaaagtgcatcattccaaccatgatcatcacgaacaatggaagccatgacacggccaaggtctgagtacaatacgttggaagcttttaaataggcagtgtgttgcccttttaaactgtcgggcatgttgaaacgttcaagcacatcggcagcatttacacaaaacaaagaaacatttgcctgagcgccaagcgaagtaaatctaagaatagttcccttttgaatacgacccgaccagtgatgtcctccgggtaaaagttcggtccaaatcgcctgattgttatgataacttgcagtgttcatagctactcctgtcggatagttttagacttcctcccgggcttttatccctccgtgtagttcgctaggaaccgtgaactctcggtccagacatactgtaagtatcggaaccctagatcacttttgattgtttaagactatgcaaaggacatgccagctgagtattacgttttttgtgaaaagtaatactcaatttgagcaaattgggtgcgctttaggttcaaaaataaaaagctgcactaaaaattgtgcatttcaaaataaaaaagccccttttattaagaggctctagagtgaaattataaggctgagatttttaaggaagcagaatcaccttacggcagtcctcttctctttcattaaaaatgcgataaccttctgcggcatcttctaatttcattcggtgggtaataatcgtttcaggtgttaattcaccacgctcaatcaattctaagagttgcggtaaatattgatgcacatgagtttggcccattttaaaagttaagcctttatcaaaagcatcaccaaataaaaaaccatgaatcgggcctgcatagacacctggtacgctgactactccaccacggcgaaccgcggctatacattgacgaagcgctgcgccacttgaaccttcaagttttaaattggtcaggactgtttcaatgacactgccttttgcctcgaaaccaatcgcatcaattaccgcgtcgacgccacgataattgtcggtattttgaataataaattcggctgcatcgacttcatcaaaattaaccggaatagcgtcataggttgccgccgcatagttcaatcgatattcattgtgatcgaccataaatattttttcagcgccaagcatcttggcacaagcagcacttaatagcccgactggaccagcaccataaattgcaacggttgagccacgtttcacttgggcattggtcactgcctgccaagccgtaggcaaaatatcggtcaagaaaagcactttttcatctgacagtgagccgggcactttaaaaggtcctttattggcttttggtacgcgaacatattctgcttgcccgcccggtacccccccatataagtggctatagccaaataaagctgcacccggtggaatctgctttttattgataatcgcgccgcgccctgtattggtggtctcacatgcagcggtcaggtcgagttggcaaaagaaacaatcaccacacgcaatcacaaatggcacaatcacacggtcgccctttttaactgcggtgacggctggaccgacctcttcaacaatgcccatgaactcatgcccaaagatatcgccatgttcagtctttgggattttgcctcgatataaatgtaagtcggacccacatatcgctgtggcagtcacacgtaaaataatgtcatctggttcttgaataatcgggtctgcaaccgtttctactcgaacgtcttctgcaccgtggtaagtaagagcgcgcatttgttattcctctatttcctataattgtcatttgattatgaggaggctttctttacggtttgcaacgattgttatttttcacgtaaggcatattgctcaaatgcaaatgaattaaggctccacttctaacaaaaaacgtgcaatatagagatgaaatcacgccgacgaactagaattccagcctagtgaaaagcatgctaatatccaaattctgacaattactcatgtcaaatttactttagagggaacaagatgttaaaaactcaaaaaatcaacatcatacaagaatttgatgcacccatagacaaggtctttgcagccttaagtgaacacgaaaatctaagcaaactttttgcccctgctaaagtcactcgcattagtaatggtaaggatgcgcgtaacggcgttggctctgcacgcaagatgtctattccgtttacaccttcatttgttgaaacaaatttagtctacaaagaaaatgaactgatcgagtacgcgattacaagcggcattagcccaattaaggcacaccgtggtgtgatgcaatttacagacttgggaaataaccgaactcgtttaaattacaccattagctttaaaggtcgcgttccttttattggcccaattattaaagcggctttacaaaatggcgtgagccgtggccttaaaaaacttaagttttaatagcctcatacccactaaaaaagcccagtgatgggctttttattttagtgtttctagacttaatactcagacagttttcttaaaaaataatctaataatttatctcgttcatctgtttcctctttacttaacaactgaaccattgccccatcaattgcaaatagaaacatgtgagcatcttctattaaggctgcgggtttgacggttaaaagtaggccatgtatttgggtcactagccagtttctataatcgaccaccactttgtaggcagtgggataaaacttttcaatttcaaaaatggccttaaaaggcaaacggtacagcccttcgaggttggcatggagataaaatatttttctcagcttatcaaacaccataagttcacgataagaatgaataatagaaaatacttcttcttttaacccatctttttgaaaggttaaacacatttcaatgagcctttcttttgaatgaaaatggttataaaacgtggctttggtcaccttagattcggcaataattcggtcaataccaaccttgtgaaatccatattggttaaataaatcttttgctgtgtgaagcactctgagtgctctaaatgaagcttctaaatttggcatagttataccgtttaaaataattttttgttgtatataaaagagatagtcatgccgtcactcttaaattgagtgctaaatacaggcatgcaaaagccgcacaataaagatgtgctcgcctatctcgggtttattgttgctatgattttttagtcgtaacgatgtttaggtgtaaaaacctagagtcggttaaaccaatttatagagtatttaaacggtataaatagagagattttggcaaaggccaataaatgagaagaaatagtacgcatgagcgaactcctttggctataaagaagtttcaccacattactgtcaaataatggtggtgaaacgagagaaggttgacagactgatagccaaaagatcagcacacccgaaggtgtccccctcccgttccaccgcagagggggcacgcagggatgcccacaaaaaagagagactttttcgtgtgcgttggctatccgacctgtcaaagtcgactggcaatgtaggccagcaggcaaaggatagtattcgcttttcttgtcgtcaagcgtgggaaatgacaatcgtattaaagtagagcggttggggaaataaaagctattacggtggagcaaatacatataattttaatatattatttttttaaattattttaaaatcccctcaactccttaaaccggaaagagtaaatcatgccttttgtgttacctctaatttggtatattccatattacttgtttttcaatttagtctttctcattcctatgtcactattaatttttattttccaattaatattagtttttttctttggagacaataaagttacaactaatatttgtatgacattagcttttttagttcttatggttgaattctggctaatttatagagcatcctatataaaaacttttgaacaacgaaatttttttcaagctgcaaaagattcattaattgagcttagattaggtttgaagatgattttaaaaaaataatagtagcttttataattttgactactcaacaactttattaattaaaatattatctgattgtattacgacttaatcagataatatttttacagcgatacaaatcgcaatttctagaaaatagatttgtacttaagattagtaatattttttgataacaagtgagtgatataactctatactgttatattctatagttttaagagtcatcttcattttttgataatttttctggcttcccgcaatgagagcattgttttctgaagataaaacttagcccattaacaaaagaacctagatcattcatgaaaaaaccacatttacaccaagggcatataccgttagctagcagcttaaacatcaaaaataatatgataggaatcattactatcggaaaataaatagataagtacttttcatctactcttgctagcatcaatacaacaataacaactgatggaactaaaaatactgagagtacaaagtttctacgtaaacgcattaatcgcaagtattttttcattttctcatcggcaaattgtttttccatttatattcccatttatttaaaatttctctttcaaatcgaccgcagtaaatacctattcaatcttctaaaagactgtctacagaaatacaccctatttttaatataaatattaatttttagtgagttttacaaactattcttcaaatagcgataaagcatctttattgccattttctgctgcttttcttagccatttttcggctaattcattattttgttgtacgccttcacctttatagtacatcatccctacagtaaattgtgcttcgtcattttcctgttgagcagctttgctataccattcgaatgctttcttataatcttgatttacacctatcccaagagcatatatcgcccccaagttattttgtgctttttcatttccttgctcagccgctttgctatataactcaaaggcttttttattatttagctctacgcccttaccttgtgcataaagtgctgcaagattattttgcgcatcggtataattttgtgcagcagctttgctataccattcaaaggcctttttataatcttgggttaccccataaccttcttcataaagtatgcccaaatagtatttagcttcggcattatcttgtgcagcagctttgctaaaccactcaaaggctttctgatagtttttaactccaccatcaccatttgcataatatgcacctaaattattttgtgctttcacttctccttgttcagcagctttactataccattcgaatgcttttttataattttgctctaccccttgtccaagagcatacattgctcccaaattattctgtgcctctgcatttccttgattagcagctttgctataccattcaaaggcctttttataatcttgaggaacaacctgtccctctacatataattcgccaagttttgcttgagctcctgcatcaccactttctgctaaatgcgtaatatctttaaaatctggttgatggccacaagctaataagttgattgctactaaaataatgccgattttttgaagtttttttcttaaaataaaaaacataataaatattaaattgtttgtgatgagaaatatattgaatgaattttagcataaatcctcaagcacaattgacccaaaacccaaacaagccctacctataaaccacttactaatccatcaactttttacggcgatacaatccacaattcccagaaaatagcgctgccaacaaacaagtaataatggcataagtggcaacattcattccaaatagctcaacagctaaaataatagatgttaacggtgccttactcgcgcctgaaaaaagactgaccaaccctaagcctgcaagcaatgaaataggcaggtttaaaaccgcccctaaagcattacctaatgtcgcacccacataaaacagtggtgtaatttcaccacctttaaaacccgaacctaaagtaatggcagtaaaaatggtcttgttaaaaaagtcgtaaaactcaatcggcacataaaaagatgaaatgattttatctgtacccaagccattgtattgctgatgcgcagtgaacaaagtgagtagcataatgacgataccacccgccatcgttcttaaaggcaaataccgaacatatttataaaagacatcactcgcaaaatgaatagctgcaataaagaaacgcgcaactaaaccaaagatcaaccctgccgcaatcaggctcatgagcgttccaaaatgaatggctggaaactcgctaattacataaaaaacatgcggatgaacaatttcgaatagctcagggatggccgaagcaatcagcgccgacacaaaacatggaaaaatggctgagtatcttaaattacctaaggcagtaatttctaaaccatagattgcacctgccagaggcaagccaaatacccccgcaaatcccgcgccaatactggcgattaagcaaatttttcgattatcttccgagatttttaaaatatggctcaggtggtcaattaaagcacccgaaagttgaactgctggcgcctcacgccctgccgaaccaccaaacaactgcgttaaaattgaggtgataaaaatgatggggctcattcgttttggaataaacgacttgggttggtgaatttcatctatgagtaaatgagttccgcgttcaatgggcgaaccatattttttaatgagataaccaataccaaaacccacaaaaggcaagaaataaataagccagtgatgcaggcttctcactttatttgaaatatcaaaagccacaaaaattaaggtcgatgccaaccctgcaacgactccaatcacaatcgaaatgacgagccagtagacactgtattttagaatttgatcatattcagatgaaggtagaattttcattcgctttcttcaattcgcctttgagtgagtgccaaattctcaaatttttttatgctgccagctcattaagtgagaaatgcttaaactgggctaaaaattaaagcccgcatatgcgagctttcaatacagtgattaatttttagtatcaccaaactgtgacaaatatctcataattactgtgttttttcaagacgaaattcgttaacgacaacgttgaaaaatttcctcactgatttgatagataaaggttatgttgagtcttagcgtactaagactcaatcaatttaaaacagttcaaagcttagtgaatactcgcaatcacggtttctgcatggcaggtcgtgcctttctcggcaccaatctgaataacaccactgcggtgtgccagtacttgaacttccattttcatggcttccataatggcaaccacttgcccctcggtgacctgctcaccattttcaactttccaagcactaatcacaccattgatgggtgccagtaaatgctcggcactgacttctggctcggctatttgggcttgaacggcggttgctggcccttgtgcaaacatgcccgcaggtaaacctagacggtgtaacttgccatcaatttcaatgtagctgagcagcattggttgttgatggtttggaatgccgcgtttggttggctttaactcttgtttaaagtcattttcgatccagcgtgtatgtacattaaattcatcggtaaagccaggttcattgagtaccgcacggtggaagtctaaaaccgacgccacgccttcaattttgaattgtttcaaagcacgtttcgcacgggcaattgcaacttcgcgggttggaccactgacaatcagttttgccatgagtgagtcaaaatggctagacactaatgacccagtgcgaacacctgtgtccacgcgtacaccgtgaccaaacggcgcttcaaacaaactcaacacaccaaaggccggaataaacccacgcgctgggtcttcggcattaatgcgaaactcaatggcatgaccttgagctttcggtgtttctttaatagaaagcacttcaccttgagccacgcgaatttgttcaacgaccaaatcgacttttgaagtttcttcagtcactgggtgttcaacttgcaaacgtgtgtttacttccaagaatgaaagcttgccatcacgactcagtaaatattcaactgttcccgcacccacatagtttgcagcctgacaaatattttttgccgagcttaaaatttgttggtaaatctcatcgctaataaatggcgcgggcgcttcttcgactaacttttggttgcggcgttgcaacgagcaatcgcgtgtacccagtaccacaatattgccatgttggtcggctattacttgcgcttctacatggcgcggtttatctaaatattgctcgacaaaacattcaccacggccaaaggcagcttttgcttcacgtactgccgactcataaagctctttgacttcttcgagtttccacgcgacttttaagccgcggccaccgccaccaaacgccgctttaatggcaattggtaaaccatattgtttagcaaactctaaagcttcctctgcattattaagtgggtcttgcgtaccctgaaccaaaggcgcaccgactgaagcagcaattttacgtgcttcaattttatcacctagtttttcaatagcgcttggagatggtcctacccactttaaacctgcatcaatcacagcttgggcaaattcggcacgttcagataaaaagccataacccggatgcaccatcgtcgcttttgatttttttgcaacttcgataatggctggaatatttaaataggtttcactggcagtcgcaccagccaagccccatgcttcatctgcaagttcgacatgcatgctattaatatcgtcatctgcatataacgcgaccgatgcaattcccatatcacgacaagcatggataatacgaacggcaatttcaccacggttagcaatcaataatttttctgtattcatcattcattctcaaaatctgtaaattcggcaatttttttaaatttgatgcggcaacctgccggaatctgtgccaccaaatcccaatggtgtttagcaactgaagcaatgaccggatatccgcccgttaaaggatgatcattcataaacaaaaccggctgcccactcggtggaatttgcaaagcgccaatacacgtgccttcactttccagttcatgggtgattttgcgagttaaaggctgttcacctgaaagtcttagcccgactcggttgctttcattggttaccagccattcttgctgacagagcagctcaatactgtcttgttcaaaccagtctgtgcgcggtcccatcacaatatctagctcaacgacttcgccagcttttggcaaatcacttttacccacttcatttacactaatgttggctgcctttacttgcccttggtaaatgctatctccaagctttaaaggctctggccctaacactgctaagctatcaaacgaagcactattgagcactggttcaacgtctataccaccgcgaactgccagatagtttcttaagcctgcggttggtggctgaatttgaaattcatcgccttcatccagatcaatcggttgatagcttgcaaagtctgcggtttgaccatcggcaaatttcacacgaatgtttgagattgcacctgccaccgcaataacgcctgcatgctgcattttggcttttaggccgccatttaaaacttcaatgacaggtgtatcggttgggttacccacaatacggttggcactatgcatggcagataaatccattgcaccagccacgccaacaccaatattggtctggtttaaacgcccttcgtcttgaataagcatttgtaaacttggcgcagtaattgtaaatagtggcaccgattgtttcggctcagccttacgtgtgatttgctgcggtacagtcaccgtagttggacgatgcgtgacatcttcaaaatgtacagtcatgcccggtaacagcaatgcaggatttttacgctctaaatcccacattttttctgttgttgtaccaatcagctgccaaccacccggactgtcttttgggtaaataccagagtattttccagccaaccccaaagagcctgacggtatttttttacggggaaccgttaagcgtggaatatcggtaaaaggcttatcgggactgctcatatacgcaaagcccggcgcaaaaccaataaaagccacattccacacgctttggtgatgttttctaatcacatcagcaacagtcagcccttgtaactcggcaacttgcgcaaggtcttcgccgttatagcaaatcggcacaatcacttcttggccgctacgctcaaatccagaatcaattttgaggctctgaattgaagcaactagcgttttaaaattggtttcgatctcattaaaaaaaccaaaattgtttttgcagcggggactaagtctttaattccattcaattgcgtattttgcaatttattgtacaacgccaatgtttcttctaagctcgcaagctcaatcagaaaacaatcggcgtttaccgataaaaaacgcatttgcttatcctttttaattcttccttagctatttagcccatccaagcgcggtcaggaatatcggtaataaacatgtaacccggtgcatgactaatggcaaaaggaattttcgagttcatgactgctgcttgcggtgttacgccacatgcccaaaacactggaatttcacccgcttcaatacgggaagcatcaccaaagtcaggcttgtttacatccgaaattcctaagctttcagggtgaccaatatgtacaggcgcgccatgtacactcggcatgcgtgctgtaatttttaccgcttcactaatttgatgagatggaattggtcgcatggaaaccaccatatttcctgaaatacgccctgccggttcgcactctatattgctcaaatacatcggcacattggtatcgtcatgaatatggcgaacttcaatacccgcttcttgcaaagctgtttcaaatgaaaaactgcaaccaatcaagaaagtcaccaaatcaggatgagcattataaatttctctcgcatcagtcacttcatcgaccatttcgccatctttccaaatgcgataacgtggaaagtcagttcggatgtctgagtctgcggcaagcttagttgcatagatgccttcttcgagcacatcaagcaccgggcagctttgcgggttacggtgtgcataaagtaaaaagtcatacgcccactcttttggcactgaaatcatgttgacctgcgtcatacccgcagccatgcccgccgttggtttatcgaaacctgcacggatttttaaacgtgcatctaatgcggcttcaagctgagctgggtcgactttaatatccttatacattgcgctcttccttatgctttatttacaaatgggcggatttcaatattattttttacaagctcggctttaatggcagccgacatttctaatgcaccgtcggtgtcaccatgtaggcaaatcgtgtcagcctgaattggggtaaatacgccatcaattgactcgaccccaccatttttaagcatagacaccacacggctcgcaacaaatgccgagtcgtgtaaaaccgcaccttctagacgacgggaaactaatgaaccatcactgttataggcacggtctgcaaatgcttcggacacaacttttaaaccagcagctcgtgcttgctctaccaagttagaccccgccaaagcaactaaaaccagttcagggttatacattttaatggcatcaattacggctgctgcctgagcttggtcatgggcaatggtgttgtagagtgcaccgtgtggtttaacgtactgcacttttgagccagctactttcgctaaaccatcgagtgcagaaatttggtaaagcacgtcggcaatgagttcgtcacgtgacaaatccatattacgacggccaaatccaacaaggtctggataagacacgtgagcgccaatggtcacgccaagttcaaccgctttacgaactgtttttaaaatgccgagcgggtcaccagcatgaaaaccacaagcaatgttcgcactggtcacaacaggtaaaatctggtcatcattacccattttccatgagccaaagctttcgcccaaatcactatttaaatctacaaacatggcattattcctttatcacttaacaaagtctggcttaaagcttggtcaaatagttaaacactgtcgtaaatgacatatagcccatccaccacgttaacagacatgttaatccacctaaaataagcaaccactttggatagttataattacccattaaatctttacggcatgcagccacatacacaaaaattgtaaggccaattggcaacaccaaaccgttaaaaccacctacgaaaatgagtagacctgccggagttgcacccaataacacatagagcaataacgctaatgcgataaaggtaatggtcgtatagttggtctgttttggagttaagttctttttaaacgcggtaaagaatgatactgaagtatatgctgcgccaatggtgctactaatgccggctgcccagaaaattaaaccaaataatttaaaaccaaatgtacccgctgcatattggaatgcttgagctgccggattggcgtcatggctggctaaatcaatggttgcaccgctcaccactacacctaaaaaagccaagaacaacacatagcgcatgatgccgactacaacaatgcccttggtcgcagctttggcaacttcattaatattttcaggtccaacagcacctttatcgagtaaacggtgtgctccggcgtaacagatataaccaccaactgtaccgccaacaatggtggtaataatggcaaagtcgatctgatctggagcaaaggtttgctgaactgcttgcccaacaggaggcattacaatgacggccacaataataatcagcaagattttaagcaatcccaacacgatcatgcttttatccatggcaagcgttgcttttttggaagcaaaaatcaaaatggctaaggcaccacttaaaataccgccccactttgtatctaggccaaaaagtgcatttaaacctaaagctgcacctgcaatattaccgacactaaagaaaaacccacccaatatcaccagaaacgccagtaagtaaccactacccggtaaggctttattggcaatgtctgatgcacgcatctgggtaagtgtcaccactcgccagatattttgttggacgacataatcaatcaaaatagaaattaaaattgcaaagccaaatgcagcacctaacttaactgtaaatacagcagtttgggttaaaaatcctggccccattgcagaggtcgccatcataaaaattgaggcaacaatggcccattggcgatctgataaaaaagaagatttcagtaaagacatattaatgcgttcctcatccatttgagcttaacaacgctattttcaaattgaatcaagaacatcatttttgtcccaaacgatattctttaatccttttaaatgacaaagattccctgttccccaatcaacacaatcggtgatcaaatcttgtgtttaaaataaaaacatagctaatccctacgaacaataagactttttacagaaatttaaaattttaaatttttgatttttataaacttatcttcaaaagtaagagtgggataaattttacttattgaagtacataagctgcttttatcgttttacctacaaaacagctttttttaataagaaaaaatagggataaaaagcattcaagaaatagcttattttttaatttgttcattgagtcttttcatggcactttctgaaacctgaaccgccacttcagttaatttttctttcaaagcaacgtcattaccatgaatataaatagacgtgaaatgaaaggtttttaaacggatgggcgtatttaatatttccaatcgtccgtcggtaatttcctttaatgccgttaaggtcggcacgaccgcaatacccaaaccttgctctgctagacgcaataacgtcgctaaagaataactggtaatagaaagtggttcatcaatccccttttctttcatttttgcctttaattctttatagggataggtaatttttggataggttaaaatggtatgcgacattaaggttttaaaagacatttgcccaattccacctttaaaagatggcgccgccaagaaactcagttcaaagttacaaagcgactgctcaatacattcaaaagccaaagttggcccaagcaaaaaggccatgtccaagtcgcctgtacgtaccccttcttgcaagttaggggtcagatctaccacaatttcaaccgaaacttttgggaattcctgttgaactttttcgatatattcaaccaaccacgtatacacaatggtttcggaaacgcctaaacgtatggttccggtcaggtgctggttttcggtaagctcggcaactaaatcagtttctaaacgcataaacttttcggcatacttaaataatgtcatacctttatgggtcagtttaaactgccgcaagctccggtctaaaactttaaaacctaattcattttcaagagatgtgattttttgagataccgcaggctgcgtggtttgtaatttagttgctgccttattgaagctatttaaagtcaccacccagtaaaatgcttcaagattctttaaattcacgtttcgtcctgtcttaaaaattcctttacttttatagtatgtaagtttttagctgagttaggctacccatttattcgtttttagttaaatttgatttatttcacttaaaaaataacgttgagcttttgatagaaacttacttaaagctaaatgtattcaatgttttcattcttctaaaatctacaaatataaaatactgtaaattgcatcaaccgcccttaaggacggttgatcgttataaattaaaagtaattgaaggtaatttttataacatcacacgtgattactgtgctgcgttcacaccaacaataaactgactacaatttgaaccttcagaagcattacctaattgcttttcagaaaacttaaattttgatgcaacagaagcataatcttttttaagggtttgacctgtgagctcacctaactctttcacttgttcaggctttaaaattccgtgttcaactgcttgattgaccattacacatgcggtggtcatcgcatcataacgtgcggccgttttagagtaacctatcgcaccgactacaccaccaataattaaaccaaccactacagccaaagttacatgcattttattcattttaaatacctaaaaaaacaaactaaaaaggagcactttaagagtttgtgctcaagtagaattaagatagctgcttttatttgatataaaaagttagattctttcagttttattgatagttgagttgtcgtaaagacattaccatgctctttgtaagtttgagatgcttgttatttctactcaacatacaaaacataagattattaatttttagtattccaagaaattcattttgaatttaaatttattaacaatacctacaaattttttgctcactacgtagatatatggtttatcagtatctctaacaatataattagacaaatagattctttaagagctcaaaaatcaccctattaatcatcttattttaaagtagtacttcaaatatataaaagtactacttttaattttggaataccctttataccttaaccataaaaaaattctaaaaaatagtctacatccaatactacattttcttttataagggttttctttagttcttctaagaaacctgtcttatatcctccattttcacctctagggttagagtcatataagtcaataattaaattttgtataacattaatttgcgaaaaaaaatcaaataaatttttagcaatgatatgtaattcatcgcctgaaatacatgctcctatctcgccactattatgattaatgtatacgacatttacatcatgctgtgttaagaatactgtagtactttccccatcaaatatatcttcaaacatatattgaatattttctaacgaatcttttcctaaaaaatcatttatatttcctcctagatcaatattaaaatcattttcaggaatacaacttaaatagcttttaaatagatcatcattaacagaattatcctgattaataaggaatctttcaccataaattatttcattacattcatcaattttctttaataaatcattaaaattcatgatacctatcctaatattaaatactacaacctttattaaactgattaatcattgcttgtctatcaatcaatcttcctctggaaacattagtcgtacttcctcgatgaccttgtttcgaatgaaaatgctcattatatgcatttggcataggactactatttggatgtttagggttttccaagaaaacaatatttcgcggatctcctttccaactttcgcctaatgctccattatttttaacactgttaatgtgatgaccagtatagccaagatttgacataacagatgagagatgacctttaccactaccacttggcgttctaagaatcgtatccagttcagctttactccaatccctagtacctgttcctgttgtttgtattagttgcttctcaagagaccaagctctatcaatagcatcttgtcgacttccagcttgaggtgttaccttatctggcttatatctaactagactacatggtgctaatccatatggatcaacccattgtacggggttcgcagtataagcatagacattaaaaccacccaataatccaatcggatctttggaaataaaacgtccaacataaggcgaataataacgataacggttataatgaagtcctgtttcctcatcaaaatattgaccttggaaacggatattattgctaataatttctgacttttcaaagaaatctgagttagtctgctctagcttacattcaccccaagctttatattcagccttccagataatggcacctgtttggtcactcatttcctgtggcgtgcctaaatggtcgcagtgatagaaccatacatcatcaaaaccttgactttgttttactgtattccaaagagggtctttataaatactatatgttttatctgaccagtcttgggtttgatgtagctcaatggggtgatgatacgccgcttgtaacaaaggcacgaaactatctttttcgtagaaatagtgttttgttaaatcagcactcgattcatacgctaaagtatcaccatcccaaccataactaatgttctgctcttgacctgtatggtgatgcttacttcttttttgaatacgtcggcctaaagcatcatagcgatattctgccgtatattgattgtttcggctacgaacaagacgtccaaatacatcccactcaagatttaaatcaccttgtgatgacttttgtcgaatcagttgcccaaaagcatcatattgatattgttggtcaagatattcctgtacgatgttattgactaagcgattatagccataacctttttcatcagaaatatgctgtgaagattgctctttggtactgttatatcgctctaaaatattacttgccgggtcaaaattaaaagtctctttcccaagtttactagttgcctctaataaacgcccaacaggatcatatttataatgaatagccccacgacgagtatccttaatgagcgttaactcaccagttttatcgtagtgatataagcgttcaatcaattggttggtatgctggatagcattattttgagtttgggcctgatagcctttgtcatgcccactcaacattaattgctgagttaagcgcccgacttcatcataactttgttgttggctaagtccatttgcatagtgtcgcaacgtctctctatgtaaatcgtcacgctcaaaactaacaacatcttcaccatttaatgccatgccatagacatgtccacttccataagacagccaatctattttctgtccgtctggtcggatggttgtagttcgattatttaattcatcatagacatgtttccacacagcagttttctgtgtcacaacatcttgatgatgctctttaattaaattacctgctgcatcataaaaccactgcaagttagtttcggcatttttagcctgaactagattacctaagccatcataagaaaattcttctgtttgtttttcttcaagctcttgtccttgatagccatatcctgcagtacgttgttctaaacgtcccatactgtcaaaaataaattgctgaatacggtctttaggtgccgcacggtctttgaaatcttgaccataagtagaagcaacttcaatacttgtggttaaacgaccattatattcatcgtatgcataaacagtttctttgccatcaaaatcaatttcttttactaatcgacccgcagcatcatagacaaattcataacttgcgccattttcattaattaaacgttttaagcgacttagacggtcccattgatattttaaagtttgatttaatgggtcagtacgcttggtaattaaaccagctgcgtcgtattcataacgtgtctgctgaccttttgggtcaatatgaactaataaacgaccttctgcatcatgaatgaaatgctcttcagcgccatcagcgtgtttaattttttcaagctgaccaaaagcattcaacggtaacccttttgctataggctgtcttagttcagtagttaattccgtatagaaatattcaactttttgctttaaagcattttcaataaatttgacgcgcccgcggtcatcatagtgccacttggtctctttacctgaacaatctgtataactgattaaattccctcgatcatcatatttaagtgtcttcttacctcctttcgcatcagtaatggaagttaccaaccccattgcattataggcatagactgtttcgcgcttcagcggatcaatttctttaattatatttcctgaagcatcgtattctttaaaccaacgcccctgttcagcgtcaacaaaaccgatcagattatctttttcatcgtattcataatagaaagtcgaaccatcggcctggaccatacttaagacattgccacgttcatcataggtatatgatgtttctgttccatctgtggcaatatgcgatgttatattttttgcttgatctctaaagaaccattcttgcaaattatctggataaataattcgataggtataaccagtaataccataataatattcagtcacgttaccatcgatatccatgactgaagttacgcgaacattttcatcccaatctaatttagtagcggaactataatcatcagcccattcctcaatcgcttttgaactaggtaaaactccatcccactttaggttcatcccacgatgagtaagatcggtataacgagttaataaatgagcttggtattgatattcataagaagcagcaaactcattagttgccttaattaaatcatcttgttcgttatattgatatgctgatagttgtctaattagttgaccctcttcaaccaaccaagctgcaacaactttctgcgcatcattaatctgtaatgctacatgtgccaatatttgttgttgctgtttaaatataatatctgataaatagctatcactattttctaattcatgatcataacgtagcccaatactaaatccattttggcgttctatggaggctaaacgaaactcattcttatatttttgatagaagcgagtttctgaaacaccatatgaaattgctctaatttcaggtgagataactgtataagtgaaagtctctacttcatcataataactctgcccaactttcagctctggtaagcgaactggacggccatcactgccaatatactcccaaccgtcttgctcaattggctcttttggatgatgcacattgtaacttgagcaacgaactattttagttgtgaaaggtgtaatccatcgcgccccgaaaatagattgatcatactgatataagtttgatacatatgttctagaaaattgctctatcaataatggatgaatttgtgcatcgatatgatttaaaaattcagtacccaacgcgaatgtaatagagtgtgtcgttccacctttacaatttttacaggcattcgcattatgagtcgctgcatgctcatcattagatttttctaatttattatttttcttgtcatgcttaacttgtgttgtttgagttggcttaacttgtgctgatttctttttcctaaatttagatgcactcattctcaatacatcaaatagccatcctattgtttgtggctgtgctgtattacccaaacctttaattttagtattggcagtgataccaattttattaatcgttgcacctacatttaatatcggctgctttagatgtgctggtactaaggaactagcaactttagcattggagtttgctccagtttttataagagcttttccccagttttcggtcatataaactagattttttccagctcttgttaagtcaccactttttattcctttaataacgccagctgcttgctgttgagcgcggctcgcatttgacccagcgtttgtaaatatttgacccttagttacaactcgaacaattccaccattaatttgtgttgtggcattttggaccgttgcaccacaagtagctaaaattgaatttagtttgtttaaccctgttttgcagaatttttctatatcccctgcaacttgatcatttaaatgattagagatcacaacaataactgcttcacctaaagcagctttacccacacgtttaacttcttgacgaactaaaaataaagctggacgagcagaagtacgaattgctgttgttccaggaataggtgcaaccccaataaggtcaatacccattgtggtccaatccataatatcggcattttgaaaacctttatcatagatatagcaaatgtcggaaaccacatcgatggcagccatcacatttccaataattggaactgttcccattacacttgccactaagtctaatgtcacaatttgatgcgtatggctctgtaaccaactatctattttttgttttgaatggctaacatctttaatcgcaacttctgttaacggcttaacaacttctgtttttccagacattttctttctctatgaattctttttaaaagggctttgcaaatattgatgaagcgtattattgaccaaactattgccatcaatagagcctgatttattgaaatcattcattttttgaatagatgtaagttcaatgttgttccctattttttgacctgcttctgaaattggtaaaaagctcttcacttgatcagttactaatccctgcgcctgagtttttaacattggcattaaagcctttgctccttcagattttatgctttgtgcagtttgaatatttttcataatattcgtaggattggttaattgtttagataattcaccaagtttggactgggctgttttactcatttgtgcaattaatgaatctgattgctcactatccgcatcattcttatttggccactcaactggacgtttaaagtcacttgcagtatcccaaggatcacggtgatctgattcgaagaagacttttactgcacctgttgctaagccagaaacttttgcaaatcccttatcatccagcttgccagtaacctcttttccgaagttatcgacaaccctataacttccaccttttacaaactcaccatgtgcatattcatgaaataactcaagtacaccttgtacacgttttggtggcggtggcaaactagattgaacacttgccgatgcgccgccttggaacacatgctgtccagcattgacctgaaatttcccgccagtttttggaaagattcccgaaccatttaaggtaatttgtgaacttgcaccagtaattacaatttctttaggactactaatttcaatacagtcttctgtcgaagaaatggtgatacctttattagcaagtacatctaaagcatctgactgggcttgtatttctaccttaccttgtgcagcaacagcttttagcccgctctgagcagcaaaaaggctcagcctattttgggcatgggcaatcacattcttttgagtacttatattaatgctgtctccagcaatctgattgatttgtgcatcagccgagatgtgaatatcttctgaactacttagagctataccatccggtgaactcaaaagaagtaaagctttttcaaatttagcgatttgctgctgaatttgtgaggcaaaatcttttaactgttcaatcgattctatttcatcggttttctggtttttagcaatgtcactcagtgctttactgttagtttgactaccctcaagttgctttttcgcaacttcggcatcgaggtggtctcctttagcgttatcctgtttatgagtggataccaataaaccttgccccgcacgtaaagctccccattggtcagtacgcagttcaaagccttctccgcggtcttcactttccgctttatctttaggatggctcaatttcccgagatttagctggcttgcaccatgactgctttggagttgggtactaatttgtcccggtgtatcatcaaatctgagttgcccaaacccaccacctgacacttctttagaacggataccactgagctttttagtatcaggaagctttcctttgttatcaaatttggttggttggcgctgtgcctcatgaattcgacccatcacaaacggtcggtcgatatcgccattaaagaagtcaataacgacgatctcaccgatacgcggtaaaaaccgcgcaccataaccttctccagcccacggcgttagaacgtcaatccaagctgaatcggtatcattgttgttggttcctgctccaccatcatggctatggtcatcactacgcgtaaataggaagcggactttaatacgcccccactcatctacatagatttcttcaccttcaggacccaccacttttgcgcgttgtggatgagtgactggactatgaatttgcgggttataagctggtgttgttggaatatgacgacgttgtaaaatcagttgattcgcttggcgttcatcactgttctcggggttttgaattgcccagttactttgcgccaataaaccattgatttgatcatttaaatctttaggtaaattattctgattaaagaagtttttagaaacaatcaaaaagcttttatctgagctttcatgctggtctatttctgggtgttcatttaattcgaaatagtaacccacataggcatcgcggactgttgtttgtgcaataaagcgtttcgcctgtgcctcgtagtaattgtggaggttctggtttaatcgttcaacttgttgatttccagatttagtaaccccatcctcaccctttaagtcaccaatccatgcaggcgaatagttccaagcttgctccaagccaagtgtagcattgtcataatgttcactatgctgatgcttactttgaacacttccaatcccttcttcttgatctaatatttctgcttgccaacgttgtatatgcataacattgggttgaagagaacgctcggcagttaagcgagtcatactgtcatattgttcgaccgcactactacggtggtaacgaatcgttttacggtctaaaggctgatattgactattggcatcaattaacctgagtttctgagcttgaatagatgtatctgtacttggaacaatatgctgagcttcatcaatgagccaactgatattttcactacgaagtaagcgtgtaaggaaattccagtcactttcgttatgttgcatcacaaaaggacgcacatcataagtttgtgttagaccgcttaaatctaaacttaaacttgcagcaaatagcggatttttagtttgccattctttaaataatatttcccatatctcaaccacgcttttattcataaatacacgtgaattacggcgatatttccataatgcggttggatcttctaaggtcagcttatataaagttagacttccatctgattggccctgttgagcatgagtaataatgcctgtaacgcgagttaattcacctcgctccgtcacaatatctacagcagcctgaacaccaataaaagatttaagttgaatcgttgcatttgtcgataggcataaaagttctgcttttaaaccatcattgagtgcatgtacaccatcaattctttgcagaaatacttggtcattcaatatcggagacgtaaattgaacatgaatagcacgtttctgcgggctaatacccaaactatctaaaacttgatgaatactgttcaacatctttataggactaaattatattttgcagtattttataaaatacatacaaatctgtctatttcattagcagtgaattttaagtgtaagagacacttcttatcagtgcataaacaatattttcgaaacttaaatataatgaaaataatgtttaattttatatattaagcttaatttttagcttatattttttttaaaataagataaagaatctattacttaacaagatagaggtaacaaaaaacaatacttgtcaatcttttgttttttatattcttttttcaaaattaattaaaaaatttcttatatctataaatctaggtagaaaaattcttttattgaatatttagtttaaaatatttatatatttcaaaagactaattaatttaattttaggaaaagagacatcaatgttgagtgttctaagttgtctgtaaactttattgacagccatgtttttatagttaattagggtttgataggcgtgtgaataggtatttttagtctcgtaaatagctttagataatagatagttgagtcctgttaaattagtatgtaaataataagtactttaaaactattttataaaaaactgtaaataagtctgaatataagaggacatttaatgaaggactttctcaccaagaaaatgtacgcaactagagctttattttttgctgtaggtgttatggctttgaatgtttcccctattgctatttctactactcatgcagcgacagaacaaaaaatggatatatcgactacactttcattaatttttgcagataaacccatagaagcttctttatttagccctcaatttttagaacaagttcccatcacacaaattcaaaaaatcgttgatgatttaaaagtctctttaggtgctcttaaaaatcttaatgtttcaaatggctctgggactattgatttcgaaaagggagaattacccgtttcaattagcttaaatgagcaaggacaaattagtactctttggtttagcgcgcctcattttaagacaataagcctagacgaaatggttaaaggtctacatgaaaatgcaatcggtaaaacatctcttttagttattgtagataacaagcctgtggttgtagaaaacgataaaacccctatggctgtcggttcgacttttaagttactggttttaaaagcttatgaagatgcgataaaaaaaggcgaattaaaaagagaaactattgtttctttaaaagaaaagaatcgctcattgccaactggagttttacaaaacttgcctgctggtacgcctgtaaatctcgaacttcttgcgcagttaatgatacaaattagcgataatacagcgaccgatagcttgatagaggtattaaagaaacctcgtatagaaacgttgtcacctagaaattctcctctgctgacgacacgagagctatttcaactgattgacccaagtaatgaaaagctcagaaataagtttaaaacaggaacaaagtcggctcgtctagaagcactcgctgaactagacaaactgccgctaccaagtgtgagtagcattggaaaattggctacttggcaagatgctgaatggtatatgtcagcccatgagatttgtcctcttcttgaaagtgttcaagatgctccggctctgaacagttctttaaatccactttttaaaaatttaaattggcaaaagatcggtttcaaaggaggttctgaatacggcgtgattaacttttccgtgattggaaaaactcaaaaaggccataaagtttgtgctgtatttaccgcaaatggaaatgagccacagcctgagtcaaaactagccatattatttacaggcatacttcaagctgttgattttatgaatcattaagagtaaaagcccatcatgattagaaggttttttagcacctccttatgatgggctattttgatttagagttattcaaagaataatcgtaaaagtattttaattaaactgaacaatagatagaaattcgctataaatattaatctatttataaaagatgctaaaaatgaaaaaagttctcttgtttgacctagatcaaactattcttaaccgaaatgaatcacttttaaaatttcttaactggcaagtaagctacttaaacttagtaccccatgagctaaaaaaatcttttattaaccgattcatagagctagacaataacggaagcgtttggaaagatattgtttacagtcaattaattaaagattttaatatcaaaaaatatgatacatctgaattgctgcaatcttacattaatgattttaataaattctctacagcatttgaaaatgctccaaaaactattcaaaatcttcatgctcaaggatacacattaggcttagtatccaatggaaaaacaccttttcaggagaaaaatttttatgctttagaattaacggactatttttcgattatcgtgatttctgaagctataggtttaagaaaaccagatcctgaaatctatttatacacttgcaatcaactagattgtaagccatcagattgtatttttattggagacaatcccaaagcagatatagaaggtgccaaaaaaattggtatgaaaacaatatattttcatccaactcttacccttcatccttctctttcagatgcaagtattcatcattacgatgaacttgaagaaacggttagaaggttaattaatccgcctcatttttaatctaatacgcactatatgaaaaaggctaatttaaataattagctaaattatttatcttgttttatatcgtatgaatatttttgaaaaaacgaagtcttgaatattatagataatacttgcaggaaaaaaatgatggaaatttcattaagattcgcgacccctgccgatctcaaagttataaacgaacgctatgccgagattgattttgtaccatcacatgctggtgaacttattgtactagcttctattgatgagaaaattattggtcaaggtagagttgtgggtattgatgctaacagcggcgagcttggtggaatttatgtttttccgggcaatgaagggttaggaatcgcccgtaaggtagttgatttcttaattaaaaattcagatttttctatgctttactatttaccctttgccgagttagaaggcttttatggctctatgggttttgctgctgtgaaagacatggctcaggttccagaagctgtactaaaaaaacatgagtggtgtaacagtaattacgacaaaccggttttgcttttagaaagaagtaaataaaagaatatttataaaaaaaccgccccagaaggcggtggctgaatttaaaccagcaatatatagaagtatggtggacgaatacttctatattcttttacgaaggagttttattggttttcataaaatcttccgatttaaaatatttaataatcatatctgcatgctcttctttaggaggagcaacagtcacaggaaatgattctttagaaattttaaatccgtgcggaattaattgtgaaattggtggaaatttaggttttccaccatcggtaattcgctcgataaaacttgctaaccagagcaaatactctccttcgttttcaaacttcggcattacacttagatcaactttgactttacattcactaagaggcttcgtgagctgctcatcaaaatcaatataattgaacttaagtttaaactcagtccctttaatggccttacgtatctgactgattaaacaattcagattttgtgtaaggtcattggtgaataagtcgtcttttttaatattcttataaaccttttcagccacggctaaatactttggcatttttaccctcctcaatctcaattgttataaagttttgatcttaaaatgttttatggttctgattatgattaaacaaatgtaaaggagtgaaacaatattatactcaaacgtaagtagttaaagctttatgtaaagactattgaacaatcacctaaaaaaattatggttttgataactcatccgcaattttttttaaaatattattatcttttgaaatatttattttcaattaaaatttaccatttggtaaaattaatacggtctcatttgctgatctcgtcttacaagtcctagaacggatctacgaactcttatttcatcttcagaaaatggtaaatgctcttttagctcatctatagaaagtgaattattttctattaaaaaacagtcttgttcggtcgtccaacgtgaagctattgattcggtttgtttccagtaacgtttcatatgccctagtaaattaatcagtctaaaagcttacgatgagtgcaagctttttatagattgtgtgcagaaagaagagtaggaatagtaccgaaatactcaaaaataaaaaagccaaacacctcaataaagcactgtttggcctttcataaaaactggtttaatccaactctaattgttgtctcaattttaaaatatcgactagtcctttatcccttttctgagataaatcgacatctttataatgtgttaaaagttctttagtttgttcttctagcaactcagtagtttcttcagagtgctgaaaattttgcatatcattccaccattcggtcataggtggtcctaaatggtgaattgcctctttaaaccccttctgattggcaagttccatatttatgtaggggccaaataaagcccatctcagcccaggcccactggtgattgctatatcaacatcttctgccgaacacaccccttctttaaccagtgaaaatgcctctcgccacaaagcagcttgtaaacgatttgctacatgccctttaacttctttttttaaaacaatcggatgcttacccaaactttgataaaactcggaagctgtctttaaaatttgcggatctgttaattttccacccacaatttcaaccaaaggtaatagatgaggtgggttaaatggatgacctaaaaaaatacgctcgggatgagttgcatctttttgaaagtcagaaacttttaagcctgaagaacttgaagcaattaatgttttttcagggcaatatgaagtgatttcttgatataaattttgctttaaatctaacctctccggtgcattttcttgaataaaatcggcatcaatcaccgcatcttttaagttgttgtaaagctctaaatttaggaaaatatcttgtaaatgatgacttgaatctgtttgctgatctaaagcgagcaaatcactaagatttgcctgtattctctttttaaataattcttcgtctattgggtaagggtcatacacctttaccttaaagcctttatataaaaataatgctgtccagcttgcaccaatgacaccgacaccaactacaccgattgttttaattccttccatatcttcctcgtgaccttattacttcaaaacttttcttattcccttgcatgactataaaaatagtcgacttcttaccttttctcagttattcaaagccattttataataagcacgcataaccaaaacttcataccattattgtacttttcttgcattaccttcatttttttaagcaaattttggctactgcttgcagccctataagcactaagggtgtatgattggcaagattttgagcatttaactttaatatgacgaatacattttctgaccacaagcaagttgaagtggtatctacttttgctgaacttgtgaatacacattttcagggaaataagaatgctatttgttggcacagaaatttggtgggcgactttaaagaaattgtggctaaacttgagttaatagaaaatattaccgaaatttctactgaagacctgttaacacttgagctttcagaacaaggtgatttggctcgagacattattttaaaagacatgcagctcttaactgatatgggtgcatcacctctacttaatttacttaagcattatgaacgtgatgaagagctcgattttatttcaacagatgtctattcatttcatgttgatcgttcccctattgaaaccgacacattcttatgtacttatcacggtgcggctagcgacattgtgccgaatgatcaggttgaacaaaaagttttaattcctgaaattagagaaaagctcaaagctttacatgacggcccagaagccgaatttgaaagctttttaacagagtatttttttgatttacattatcagcctaaacccgaagcacaacctataaatttaggtattggacatatttggcgtttagcagtagatcatccaactcaaaaggttttaccgtgtgtgcatcgggcaccagttgaaaatgacggtgaatatcggttgctattgatttgttaggtatttcaaaatcttatatagaaccagtcaaaaaccaaaaattacttttagaatcgtgaagaatttctggtcgttaaaccacagtaaaaagataaatctgaacatttaccaaaaataaaataataaaaaattatgatttaaagtcattgaccctcacgtaacgtaagcccctagcataaaacacgcctaaggaagaaggagctaaaaagatgctgttaaaagttggtgaattggctaagcaaacaggacttactgtccgtgctcttcatcactatgacgatatcggtttacttcagccttcggcccgttccgatgctggttatcgactatacacccctaaagacatcactcgtttgcatcaaattcaagcattacgagggctgggtatgtcgctagccgaaatctatacggttcttgaagatcccaatctagcacttttaccgattattgatcggcagattcaagcaattgatcaaagactggcagagcagaagaaattgcgaaatcagcttggacaattgaaatctcagctcatcaatggtgaagaacttgatttggaggattggctaaatatgctggagcttatagcaatgtacgagaaatactttacgcaagaagaacttgaaaagcttacatttttacaatcaggtactaaaacccaccaagaatggcaagagttaactcaagctgtaaatacggtatttaatgctggagaatcatctagcagtgaaaccgctcaaaagctcgcccataagtggatgaaaacacttgagcagaatacgcgcaccaatccagaatggcttgttaaattaaataacatcaattctgcagaacctgaatttcaggaaaaattaggattaatgccagaagttgttgagtttttacttaaggccttttcagagagtaagctgagtatttttgctcgttatttatctgataatgagtttgcttttttaaaggaaaattatgttcgcgaaatgaaaaaatggcctcaactattagtcgatattgagaaattgattgacgctgaggttaaaccgaatagtgaaggagcaaagcgtttggcacagcaatggctctctatgctacaaggttatactggcgaaaatccaagcactcaagaaaagattcgtacagcaatgcaaaatgaaccaagccttgctgacggtacttggcttaaaccggttaccctacactttctagaaaaagcagtagcagcattcaagcatactacttagttctatctatcaatttaaatggctctttttttcaggaagagccatttacccataaatatgattaaagtaaagaaacagtttcaagatttttagttataaaactgaatattgcagactgtgattcaatactgactaaatgactttaaaaaacttaataattctgtccattctcgcaattgcataagtaatgtattcaaaataatatttagacaaatagattataactttacatattgtttggcttatagatcaatactaagaagactgtgaagttaaatttaaaatgaatcattttggcagttaaagccatccatatttaattagagaaacatttgatatgaaaaaatatttattcttacttttaatgagtttttactcaattcattcatttgcttcggacaaactacatggcagtgtttggaaaactattgatgatgccaccaatcaaccgagagcgctggtaagatttagccaagacaaaaacggatttctatccgcaaatattgaaaaaatccttgttccaagcgaagccagtaaatgtacgatgtgtgaagggacttataaaaataaatctttaattggtttaaccattgtcaaaaatttaaaaaacgtaggtcaaaataaatatgacaaaggatctattctcgacccacagtcagacaaaacttatcgctttagtgtaaccgtatcaccagatggggaaaaacttaccgctcgtggctacattggtatttctgcaattggccgaaaccaaacatggtatcgagttaaataatccatgagtagcttgtgaccaactctctgaagctactcatagatcataattacggtctatatatgtactatgtaaattctatatttagaccgtattatgaccgatacttggcctgaatcatcagcatgataatgacgaatagcgaaggtatggcagcaatcacaaataaatgggtaatgaccagaaattgagagagataaccgccaaataacggcccaatgacagaacccaaacgagcaattccaatactccagcccacccctgtagtacgaagtgaaactgggtaataactggccgacaaagcattaatggcaggttgcccaccaacaatggcaaagccagcaataaaaatgataataaacaataaaacgatatgactaacagaatagccaattaaagcaacactaatcactgcaaccagaaaaacaggaattaatactttataaaatcctgtcttatcaattttaaggcccatcaccacactaccaatcgtaccgcctaattgtagagtggagccgatcaacaatgcctgatttaatgaaagcccggactctttggccaaagtcggtagccaatttgccagaaaatataaactgatcatatttaaaatactgatgatccagatggaataggtaaaaaacgcacgctgatttttaaataactcaagcggtgactttttaacctgaacctcagtattattgatgatttttatctctgcattgaatgttaatgctggataaaacttctttaaccaaaacaaaattttggagctatttttgctatgttcacttaaaaaatataaagattctggtaacttaaagaatgtgataatgaaaataattaaagggataataccgccgaaataaaaaatcgcctgccatcctccccaaggaactagtaaggctgatattccgccccccaacattgcccctaccgtatagccacaagaaatgaccatcatggtaaaaatacgagattgatatggaacaatttcggagctataagccatcacatttggcatgataccgcctaaaaaaattcctgtaacaaagcggattacggtcaattgctcaatattgcctacatgtggtgtcaacagcatcaatatggagaatataaaggtcgagatcagtagtatcggacggcgaccaaaacgatcagaaagtgaacttaataaaaatgatccaacaaacaaaccaaacaagcttgcactaaacacaactcccagcatcgatttttgaacaccccattcttctataatcagtggggctgcgtaagccatggactgaatgtcatacccatccataatcattagtaataggcaggtaaccaaaataaatttttgataaggtccaactttctgctgattgatcaaatcacttaatacaatttctttcatggtattcctttctccatgactcgctttaaattaattccattttaattatgatatacgtaatccatttacgattagcgtaaaataaaatagcaatattatcgccacaaagtcaaaaatattaatttttataatataaacagtatgttatatctaattatttgatctaacctgagtaatgagctcacatcattgcagggtgtatatggtctgctcatctaataaaaatcaagcaaaccatacatccttttatttaaataactcatttacctcaaacaagttggcttaaaaaaatactccaccaccacatccctttcatccaaactctttgtactcaaaaacccgaacatcaagccatctattaagtttaaaaccatgttggcatcgggttttaacgcacgtatttctaagctaaaaatcagttcaaaaatttcacgagtcagccattttctatactctattgccatacggtaagcctgctggtaagccactttaatttcaaaaaaggctttaagtagcaagtgatacagactgttagagttaacatgtaaaactactatttccttgagcttatcggttggcgtgcaataacggcttgaatagataatcgcaagcacttcttctttaagtagacttttttggaaagctatacacatttcaataagtcgttcttttgagtgaaaatagttatacaaggtggctttcggtatttctgattctttgacaatcaggtctacgcctgttgtatgaaatccatgtgtggtaaacaaacgaatagcggtacgaataatgtgtaattttttagaagaggtttctaaatttggcatagttttaccgttataaattcttgttgtatgtaaagagatagaaatgccgtcactcttaaaatgagtgctaaatacaggcatgcaaaagccgcacaagtggtgtgctcgcctatctcgagttttgttgttgatatgattttttagtcgtgacgattcttaaggtgtagaaaacctagagccgttttaaagactgtttcggcggtataaataaagagaatttggcaaaagccaataaataagaaatagtacgcatgtgcgaactcctttgggtaagaaagaagtttcgccacatcactgctaaatgattatggtggcgaaacgaaaaggggttagcagactgatttacccaaaaatcagcacatccgaagatgtccccctcccgttccgccgcagagggggcacgtagggatgcccacaaaaaagagagactttttcgtgtgctttgggtaaatacggcctgctaaaaccgactggcaatgtggccagcaggcaaaggatagtgctctgccctattacagtcaagcacacaaaatgacatttgttttaaattagatcattaaaaactaaggataaataattaaaaattattgttaatttgggatttataaagtctcggtttaaaggcctttaaatctctcagttgactgtataaaaaggcataacaaaatcagtaaaacttcgcttcaccagcaggacgagttttaaaccttctatgaaaccacatgtattgtgttggggcgatccgaatctggttttcaataattttattgacgcgttcagcatcattcacttcgcattcgctaggaaaattttcaagtttaggttctaccagtacattgtattgaggatctcgaatatccccgcttctgtaaaaatactcaaaatactctgtacacgacaaatttcacagaacccttatcctatcagggttctgccttcttaaaattgccaaaatttccttaaactcttcttttttcccaaaaccaattaaacgctgaatcgccatttgaacatagtctaaaccatagcgaaataaactcattgagagtcgtccatgcttctttatttttatcgcttttttttgatcatgttgccattcacccgttaagtaacaccaacagaagcttatagctaacaccgcaatcaattttttcactcgtctagggtctgtcaagcgcgtattttcaagattaaacccgcgtcctttgagacaactgaataaggtttcaatttcccagcgtaatgcataatcctgaatagcattggcattaaactgaggagaaacgacgagtaaaagctctccattttctaactgtagtgcacttatatatagtttcacccgaccaaccaaaatccgtcgtttacgacattcaatttgaccaactttaagatggcgaaataaatcactaattttatgattctttcctaaatgattggtgacaatgaagtttttttaacacgaatgcagaagttgatgtcttgttcaattaaccatgtaaaccactgctcaccgataaactctctgtctgcgaacacattcacaatacggtctttaccaaaaatggctataaagcgttgaatcaaagcaatacgctctttcgtatctgaatttccacgtttattaagcaatgtccaaaggataggtatcgctattccacgataaacgattgcgagcatcaggatattaatatttcgttttccccatttccaattggttctatctaaagtcagttgcacttggtcgaatgaaaacatattgaaaatcaactgagaaatttgacgataatcaaaatactgacctgcaaagaagcgctgcatacgtcgataaaatgattgtggtaagcacttgatgggcaaggctttagatgcagaagaaagattacatgtttgctttaaaataatcacaagcatgatgagcgcaaagcactttaaatgtgacttgttccattttagatatttgtttaagataagatataactcattgagatgtgtcatagtattcgtcgttagaaaacaattattatgacattatttcaatgagttatctatttttatcgtgtacagaggtaaaaatataaaggtattgcaacagcgtttgaaatatccatgagtcttcgatgtgccgtgactgttgctgcctgtattccaaagaatgaagccataacaccttgctttaaaccaaagtcctgatcagggctataccagattgcatgaccatttttgagtttttcaattaagctacgcatattgtcttttgcaatctggtttttataaaccctagcgcgactacgatgaatgaggaaatccatgaaaggattattttgaggtctatacaccacatccatatcaaaaaataacgtacatgcagcacctccggcatcgagtaatgtgctatgcgtgcctaacagcagaatgccccgatcccgattgtcatttagatgttccaagccttctatatgaactctttttttaaaccatgcaggacaataccaagcatttaaggcttcaaatataccaatcatcgtatcggtaaaaaccgacttagccttggcttcaatttgctcaggtgttttttccggaaaacacgcacctaaatttcttaaagtcgttttccttctagaacccaatagtgtccaagcaatttttgaaaacagttttgctaagcgccactggattgcccaaggcaagtacgcaagaaacattagaataaaagctgtgaaccagataccccaatattttaatgatagaaaggaaaattgaaattgccctgattgatactgcgcttcaggtttcgtcatattgtaaatatctagaggtatagaaattcatcctaacacactcgcactctacatacgtttgtaaagtgtgtcttaatattaggctcaatctagcaaactactgctaaacagtactggtgagtgctccgatttattctttatcggtcttgatgggcaattgcttgataaactcatttaaagacattggacagccccataaatagccctgaaactcggtacaaccattacttttaaaagcactaaactgttcagccgtttctattccttctaccaacacgcgaaggtttaaatctaggccaattttaattatacccgtcactaatttattgctgcgtttatcatctaaagctgcctggacaaagctgcgatcaattttaatttgtttaattggcattttttgtaaatagcttaaggatgaataccctgtaccaaagtcatcaagtgaaagctgaataccatgcttagacaagaaatgcattttttcgatcatgctcgcacaattatttaaagcaatattttcagtaatttctaatatgagccgagagggattgaagtcataccgctgaaccagaccaatcacagtgtgctcaaagttagattgcataaaatgatcagcactaatattgattgaaagcgtaagatctttagtctcttcttttttactccagtcctgtaaaactttgcaggcttgggccaatacccactctccgatctctggcattaacccaaaagttgccgctgccggaataaactcttttgttggaatatatcctaaaaccggatgatgccatcttaacaaggcttccgcaccaatcagtttttctgacgaattaacttggggctgataaaaaagctcaaattgttgtttagtgagtgccaaacgtagattgtgctccatactgctttctatttgtatttctaattgcatggtataaattgaaatacaaatcataagagtagcgacacaagtggctatccacccaccatgatcacgaatatcttctgataaaggtatggcactatcgagagtaaaagagctaccactaaaaaatataaagcagccaatcgacagtaaaattaaaacaatttgtaagaagcttggctctctacggtaattcaaatatcccaatatcgctccggcaggtaaaaacaaatgggccactcgagggcgatcaggcgtagcaacatcgaaaaataagcaaaaaacgactggaaacaccagcaaaaccgcttgtgataaaagtatccctgccgaaatacggtttatataaataagaaaaaagctaaatatggaaattagtgtgaaacagatatccatataaacaatcacccacatttgggcaaatgcaaaatatatagtccaaaataagcaaaaaataatacaaataaagatatttgctttggctgcgattgtaagctgttggtcctttagggagcgataatgtttcttgtgttttttaaagtaagacgaagttatcataaataaaccaaccgtaaatatttctttaaaggaccccagccagcttggtcattgatactccatttcaatatttaccaataaaacgtaatcatttctcccattgtgatttgtacttattattttgagatcaagttttaaccaccttaatggtatagcccgattaggtcacttgaacgatactgctttttaaacactctataattttaaagtatcatgacttaacgatacatgcctatgactctcaggtacagcctttaagtgcagaaaaattagtgaattacaatttttgcgttaaatatttttattatttagattcatcaataggaccatttaaaataatgcacatgtgtgcttaattatgctgctaatgaccaagttgttagctttgttgttctgaggttggagctaaaagctaaagaacccatgagatacccatctcatatttttgatcggtctatctcatgtttaccagaaatatttatttttaataatatagaagtctcagcttataccttattacgtttataagaaaaataagaacaacctgcacacgatgccataataattgttatgcctagaacctgaaaactatttaatcgttcatttaaaattagccatccagccaaagcgctcactgcgggtgacgcacttagtaaaatcccaaaaactcgaggatgcagttttttcatggcaatcatatctaatataaatggaatagcactcgcgagcatcgccataagtaaacatgtaaaaagaatcttataactatcaaaaatatggataaagtgagatgcacctaaaggtgttgcaaataaagccgctataaacattccggtcgcaacagagctaccaccaccttgtgcaacttttgagccataaatcacatacagcccccaacccactgcagctaataaagcatacgtcatgccaataaaactaaagttattatttgcattgcccataggtaaaagaagcaaaccaataattgataatcctccccaaaaataatctaatttatttttagacattaaaatagcaaccgtaagtggtcctaacacttcaatggaaatagcgatccccacagacatgtaagaaaatgctttatagaccaaagtattcattaaagtgaggattgatccataaataattagatttttccaattggtctgtttattccactgtcgccatggtttaaagactatccataagaaacaggccgataaggcaagtcgagttaaggtgactccttcagcagtaagaatcggaaaaaggacttttgctattgctgcgccgatctgtacagaaactaaagataaaaatgcggctgcaaatgccatgccttgcttggagtttgtctcaatcatcatatttaccgctctgggaatgattgaaattttaattctctataatcaatatatttcttctatttttcacggtaaaacgattaaataactctatatttaacatttaatgagagatttactcatgtcagagatttctttagataattttgattatgcgatcttaagaatactgcaaaaagacaataaaacttcccatcgagaaatttctgaaaaaatcggtctatccgctgcatctgtacaaaggcgtataactcggatggaagaaaaggaaattattttaaaaaattgcgctatcttaaatcccctcaaatttggtgaaaaaattacttccattattgaggtccgccttagcgaagatcgttcagtagttatggacagagcgaagctatactttgcttctgttgaagaaattcaacagtgctacttcgtgaatggaggagtctcatttataattatcatgctgagcaataacttatctcattttgaaagtttagttagaaaacatttcgctgataatgaggatgtaaaaacttatagaacactcattgttttagatcgcgtaaaagtaaactttgagttgaatatttaaatttttcaatccttggcttaaaagacccaattgttctatttttatgtcttgctacattcaacctctatttcaatgcttgatcactttttttcgttaactcaaatttgttaccattgcaccactggaatggtctgaagtcactttatactagggatgctgattctaaagttcatccagttgttgtacttttcttgaattacattcatttttaaagacttgaaattggttaataaaccaaaagtagatttttcgtttttttaagggtttattacgcatgaatagcgctgaaatcatggctgatctctccaaccacactccaatgatgcagcaatatctcaaagtcaaaaaagactatcaacatgcgttgctgttttatcgtatgggcgacttttatgaactgttctttgaagacgcgcatttagcagccaaacttttaggtattaccttaacccatcggggtaaagcaaacggcaacccgattccaatggcaggtgttccctaccattcagccgaaggttatttggcgcgtttagtaaaagccggccgaactgtagctatttgtgagcaagtcggtgaagttactggcaaaggcccggttgaacgcaaagttgttcgtattcttacaccgggtactttaaccgacgacgcactacttacaagttatcagtcctctaaccttgttgcgctatgtatccatcaaaaccagatcggttttgctttactcgacttaagtgcgggtatttttaaagttcaacaacaagactacaaaccggaacaacttccaattgaactggctcgcctcatgccaagtgaaattttgattgatgaagacctggttgacccgaatattatcgaacaaattaaaaaacatttagattgccctgtaaccaagcgcccaaatgtcgattttaatttaaacaatgcgcaaaaaaccttatgtgaccagttctctgtatcaacactctctggtttcggactagacccgttacctttggctaaggccgccgcggcagcacttattcactatgccaaagaaactcaaaaaacggcgttacctcatatccgttcaattcttttagaacaaagttctgactttattgcgctcgacccaatcacgcgccgtaacttagaaattattgaacctttgtttgagcatggaacttctttatttcagcttgtgaacgattgccaaaccgcaatgggtggacgtttacttagccgaacactcatgcaacctgttcgtgatacagcattacttgacgcacgtttagatgcgattgagcaattgattcaaggctaccatgaaagccctgttcgtctggtacttaaagaaattggtgatattgaacgtgttcttagtcgtgtggcgctgggtagtgcgcgaccacgtgatttagttcaacttcgtcatgcttgcgcgcaaattccatttttacgaaatgctttagcacctgttgtacaagcaaagaaatctaagttattaggacagctcgatcaggaattgggtgactttaaatcgcttcatcaacatttaatggctgcaattgttgaaaatccgcctgtattacttcgtgatggcaatgtaattgcagaaggttatgatgctgaacttgatgaattacgccaaattcgtgatcatgcaggtcaattcctcattgatttagaaataaaagagcgtgaacgtactggtattagcactttaaaaatcggttataaccgtgtgagtggttactacattgagctgactcgcgctcaagccgagcaagctcctgccgactatatccgccgtcaaacattaaagaatgccgagcgctacattacgcctgaactaaaaagttttgaagataaagttttatcaagtgagtcgcgtgcattagctcgtgaaaaagcattattcgaagctttacttgaaaaccttcgtgaaaatattgctcacctacaaatgatgagttcagcaatcgcgcaaattgatgtaattgcaaactttgctcatcaagcgcgtttaaacaactgggcacgccctgaatttacaccagaaaccggtattaagattcaaggtggccgtcatcctgtagttgaagcgttaagtaaagcgccatttacaccaaatgatactttccttgatgtgcagcaccgcatggcaattattaccggtccaaacatgggcggtaagtctacctttatgcgccaaacagcattaattagtttgcttgcttactgcggtagttacgttccggcacgagctgccaaacttggccccatcgaccgtatttttacccgtattggttcagccgatgacttatcaacaggcaaatccacctttatggttgagatgactgaaacttcacaaatcttgcaccatgcaacgaatcaatcgctcgtgttaatggatgaagttggtcgcggaaccagtacctacgatggtctttctttagcgtgggcttgtgtggttgatttaaccaaacgcgttaaatgtctttgcttgttcgcgactcactattttgaattaacagagttgggtagcgaacctggtattgataactaccatgtcactgctcaagagttaaacggtaatctcattttattgcataaagtccaacaaggaccagcgagccaaagtcatggtttacaagttgcaaaattagccggtattccagctaatgtgattaaagaagctcagaagcgtttacgtattttagagaagcaacaacagcagcatttacaaactagtgttcaaagtgatttgtttgcaactttagattcagaagttaccccaagcactcaagtcatagagaaagtgatagaagttgaagtctcttcacctgccctcgatttacttaagcaaatcgaagtagacaacctgactcctcgtcaggcacttgaacagctttatgagctaaaagcagcgcttaattcataatcactcattgagcaaacatgtgtataggcatgtttgctcttactttaaggagaataaaatttctattttcttaaggccactacaatacacagaaatcgatttaatttggcaacagattaatcgtcgtgaactgattacccaactctacttacaaaagcaagaacacttagaattaacagattgtttttatgatgttaaacattgggatgcttatcatttagaaaatgatccgcccaaattaaaagaactctatgaacaaggggctttatttatcggtgcttttgatgcgtctgaacagttggctggcattagtgtagtctcgaatcagactattactgattatcccgatgcaaaattactgcaatatttttacgtcgatgccgatcaacaaggtaaaggtattggtgcaaagctgatgcaagcggcaaaagaatcggccaagcaattggaagcccatcaactttatatttcagccactccaagtaagcgtacagtagatttctatataaagcatggcgcggtcgtattaaagcacccagatcgtcaattatgggaacttgaaccagaagacatccatttactttgtacactttaagctcattacttaaagattttttgtctatcgattcaacatagaggcaaaatttaaaagtaaatgttgtagttgaggtgtctgcttaaacagataccttgacccaaatgacattaaaactcatgacaaaaaaattatttaaactattgttttataaaacttattattatcctgattttataatttagctcttatttaagctgaaacattcttttgaatatcaatgtattaacttatcttcatatgtataaataaacaatatcaataaaagcaattgtttgtttaccccttttttgcctaaaataagctattcgaaatgaaaccatattttttaggtagctgtcgccatgacctttgttgtcactgaaaattgtattaaatgtaaataccaagattgcgtagaagtttgtcctgtagactgtttttacgaaggtccgaatttcctagtgattaatccggatgaatgtattgactgtgcattgtgtgaaccagaatgccctgcaaatgcaattttctctgaagatgagctaccagaaggtcaagaagtatttattgaattaaatgctgaactttctcaaaagtggcctaacattacccaaattggtgaacagcctgctgaccgcgaagaatggaacggcaaaccagataagttacagtatctagaaaaataatttcaaaaagatcagcaaccgctgatcttttttataccctattcaaacatttcattgcaaattcctcgtaatttgtgcactgttttgcattaaaataggcgcaatatttataagcttttgatttttcttatgcggaagtttttgcagagcatgctgcccctatgcataatccctgcgattatggtgggttgcgccagctctcctcaacacacaacaacaggcaaaacctctccaagcggtaagcgcatctttattcctcaagagcgcgttattatcgaacgtcctattccacctaaagttgaacctgcttcctatcgcgcttggttaaatacaggcgatcattatgaacgtgtacgcgaatatgaaaaattcctggcgcgtcatgatgtggcaggtatcgtaccaagttttgaattattaagatccgctcgtgattggcagaagtgtggccgttcagaatatgcggtacctaaccgtgaactttggaataattctttatcgaccttacgtgtctttaaatatcttattgccgcaaaagttttaaccgactttgaggtaacttcagtttaccgagacttacctttaaatgaatgtgcaggcggcgcaagttcttctaagcatttatttaactctgccatcgatttccgtattgggccagaagttccacagccacaagactatgcgtttattgaaaatacgaagtttaaattgtgtcagttctgggctcagcacggccaaagtttaaatttaggtattggattatatagttcaggacaaatccatattgatactcaaggctatcgtacttggggacctgacttaacccgcaatacatcaatgtgtaatttctaaaatataaatccccttatgcgcttcagtttaaggggatttgctcattctataatcaaccaaaatttcttgaatcgaagatttttgcactctagtcataaacgtttaaaatacgcctatcaacatacaggtaaatttgactatgcagcagatgtggacagacattgacgaatatatcgattcacatttaattcccgaagatcctcgactcgactttgcattaaaaaataccgacgaacacggcttttcaaatcatcttgcagttgctccaaatcaaggaatgttcttgcaaatgctcattcagatgaataaatgcaagcgtgttttagaaattgggacctttgctgcctacagtacaatctggttaggacgtgcactgcctgaagatggctatttgcttaccattgaaggtcgtgatactcatgcagaaatggctcaaaagaatatcgatcatgccaacctgcctgtaaaagttgaccttaaattaggccgtgctgccgatgtactttctgcaattgatcctcagtcgattgagccttttgattttatctttatcgatgccgataaacagggctatccggaatatttagaactcagtctcaaattttctaaatcgggcactattattgtgctagataatgtcatccgtgctggagatattttgaatcctgaaaacaaaaaaccaagtattgaaggcattcgtgaaacctttaaagccctagaaaatcatccgcaaattttgtcttgcacagctttacaaacggttggctcaaaaggtcatgatggttttgcaattgcaattgtgaaataatggttaaaaaatcatctttttcattttattatttataatcaataaattacttttattacccctgcttttccatatagttatccacaagatttgcggataactatatgcaaatctcatcatttagccacaagtaatggtacagtcgcgttacggaaaatcgtggttgcaatacttcccaagaagaactgatgtattttgctatggctaaatgcgccgagcacaataatttgaataccatgttcttgttggtactctagaatattttgcgccacatcaccgtatctataaacggtcactacatctagccccgcttgtttcaagtaatgctctggttcattcaatatttcaggatggtcaccgacataaactaaatggcactgtaaagtccgtaataggtcactttgtgcaatacggcgcatcattttttgacatgtcggagagtattcataagcgaaaataaaacgtgtcggtactttgaagttttcaccaatggtcaaaaccgtacaatttgcaccgcggataaagttttcaacattgctgccaatcggtttatgtttttcggcggctctttcacccacccgacccaaaatcacaatatcgttttcgtgtaagagattaaaactttgctctagaaaatcccctttttcctgaatttttgagcaagtaattccgtgtttttctttaattaagtcagagatatgtctgagtaaattattgctgtaatctaaagcgagttcactttgtttttgctctaattcagctaactctttaagcaacattgcattgctttcaaagccgattacgccactaatttcaccaaggtgataacttgccgggtagtaatctagaatttgtaataatacaagctctcgtccagttgctttcgcaacccaagccgctgcatctgcaatagcattaatacaaggtgatgagtcaatacacgcaataacacggttcatttttgcctctcttcttcaggtctatttgccttggagatttttctataacttagctttaacttaacatagataaaaatccgtatgttaaggtttatgtattaaaatccacttttttgtttaaagatcaaacattttattacattcttgagactgcattattctcttaaacggataaattttgctgggtttcctcccacaatatggtacggctccacatcttttgtcaccatactattcatgccaactacagcatgtttaccaattttaatcccgtctttaatccccacatgcgcacctaaccaaacatctttttcaatttcgataccctgtgagcgaaccggctgttggtaaagtggacggtcgagttgcatgccatgatcaaatgcatagagatgacaataagcagcaatacgaacttgatcatgtagttttatgcctgctcgaccgccatctaaaatacagtggtggttaatagcaacttcattaccaatctcaagcggtccatgcaaactacaatctgccgcgataaaacaattattaccaatcttaattttccggcccggctcggcaaaaatatgggctaacggtgaaataaaacagttctccccgatctcgaccgtttccatatccattaaataagcctgatattctttttgccattcttccgcccaaacacggtgtttgggtttcaatgtccaatatagccatggcatataatttaaacggtgtttatgttgctcgcggtacttgagtaaagaatcagtcatcagtcaattcctcctcaacttttaattcttcgcgaccacgagtcacatctcgtagttttagagcgagtggttcaatttggtgaacctgtaatctcgcttcgatatcgacacctgttgcagtataactttcctgatattcaatttgctgctgtgtcagctcatactgaaagatggcccattcattaaaatgacaagaaaaatgaatcgttttcttggcaatcagttcaatacgttcagctaacaataatgattgtccggcacaaccaccatatgcccgaacaagcccaccagttcccagttttataccgccataccagcgattcaccatgacaataatattagtcaggtcatttccttcaatagttgccagaattggacgtcccgctgtaccagatggttccccatcatcattaaagcgaacgttatgcccaattttccatgcccaacattgatgtgtggtcgagatatctttatttaattctaaaaactctttcacttgctgttcattttctactggcgcagcaatcgcctgaaatctactttttttaatttcttcttcaaaagtaacgggtgatgcaattgtaaaagccataaatgaaataaagcataataaaaatcaaattataacgtgaatttaatagaagcaaacctataaaaaagccccgaatttcggggctttttttcttatctttctcttaatgcttctttggctttattaaatggtttaagtaagtaatccagtacagtcttctcaccagtacgaatatctacagttgccaccatacccggtgtaataccgaatgctttaccttctttattgtaaagcttgtcggagtcagttcggatataaacacgataatagaattgatcctgtttcacttcatcgcgaatggtatctggagaaataaccgtaaccttaccttttaaaccaccataaattgagtagtcataggccgtgatcttaaccaaagcttcttgaccaggacgaatgaacgcaatgtcacgtggcaaaatacgggcttcaattaataactgttcatcaattggcacgatggtcattaacttaccgttttgtggaatcacaccgccatgcgttgtcactgtaatttcttttaccacaccgcgcacaggagctttaaatacggcacgttgtaaactgtcattacggcccatgacaacttgttgttgagtttgcgtgtcagtatttgctttagataactcttcacgtgccttaacgtagtattggttacgtgcatcgttcatcttgttttgcaaatcatttgcttcacggcgtaagcgtaaaacctcaacctcacttgccgcacctttggcaaccaaaggctctgtcatggccaattcttgctgaaccagttgtaaagcctgtcttaatcctgaaagcgtttgttcaagatcagctctgcgtgattcatacaaagcagtctcttcatgaacaagcttcggatcttgtgcaactatttcagggaaaaccagtggtgtaccgttcacttccgcacgtaaacgtgctgctgtggcctgagctgcaattaataaagatctcgactcacccacatttgaagcaaaacgagttgggtcgagctgagcaagaatttgccctttttggacaatatcgccttcttgtacatttagcttagttaaaataccgccctctaaagactggatgacctgttctttagatgatgggataaccttacctgtaccggttgaaacttcttcaagcttaaaaaaccatgcccagataaagaaaatcactaaaccaatgcccacgatccagatgactaaactggcacgcggtaatggtggttcactataagatacattcattgaacgggtaagttcttgttgttgttcgctcatgaattgcccccttggctcacttgtttttgttgggctgtagattgattaagtacctgatctcgtggtccatccatcacaattttgccttcattgacgacaataattcgatcgaccagttcaagaacagctcggcggtgggtcgccacaaccaacgttcggtgtgctaaccatcctttgagatgatcaattaattgtttctctgcaacatcatcaatggctgctgtcggctcatcaagcaataaaatattcggttgacgaatcaataaacgagccaataataacgcttgtttctgaccaccagagaaaccaacgcctccttctaaaaccaagtaatccaagccttcttttttctcttgaacaaaagataaagcacctgttaccactaatgcacgaagaatatcttcatctgttgcaagcggtgcacctaaagtcaggttttcacggattgttccgtagaataaatgtgcattctggttgagtagccccatatctcggcgcacatctgatggatcaattaaggaaagatcgagtccatctaaatgcacagctccctgagttggaacctgcataccggataaaagctgaagcaatgtcgacttaccagcaccattacgacccaaaatcgcaattttttctccggcgcgaatttttaaatggcggatcgcaagacttggtctcggatcttcttctccatattggaacaagatattttttaattcatagtcgccatttaaaacagctttgtgtaccagatgtgaacggtcggcctgatcaatcggacgttgcataagttcatctaaactttgcttagcaacttttgcctgttgtagacgacctaatacgcccgtaatctgggcaattggccctaacatacgcgaagataaaattgaacatgcgactaacgcacctgtggtcatttcaccgtccattaccgcaaaacagcccactaacaccacaatggcataagttaaaccctgaaccatttgggtccaagccattaaggtacccacaattttacgctgtctcataccaatgtcggctgagacttcattcatatggttccattggttttggaatcgtgattcagcacgtaagagcttaatgtcttcaataccttgtaccgcttctaccaaaattgcgttacgaattgaagattctctcatgccttcttgtgccagttgagccaacttcttctgtaccaaaatacccggcaagatcataagcggcacaacaagtagcattacccagaacagttttccaccaataatggcaaaaattactaagaacaggaaaaagaacggaaaatcggcaatcgcactaattgtagttgaggtgaccagttcacgaacgccttcgagttcacgaatctgggaaataaaactacctgtagatttcgagcgatctttatttttaattcttaaggcatggccaaatacacgatccgacacacgtaaatcagcacgtttaccaatgatatcggataaatatactcgtgaaacacgtaaggtaaactcaaaaagagcggcaatcagtacaccacccgccaaaacccataaagtgggaattgactgggatggaaccacgcggtcatacacttgcatcgagaaaataatggttgccagtgccaacacattggcaatcagcgaggcaaacataatatcaacgtagcgtttccagtctcttaaaacgattgaccagaaccagttggcttcataaggtttgatatattcgtcaatacgtgcatctggaatagacgtttcaggacgcaagatatagacatttttaagtgtagtttttaaagcgtctaaagataaactttgtgaaaggccctgatctccactgaactggatactcacatttccttgggtatcagccttatcgattacaccgacttgaccatcattaaactccaccatgacaggtaaacgccatgggttgagtaagtctaaggaaaatggtgccttacgaagattcagaccgacttgacgtgtcattaactgcaagacgttatctaaattctgattttggttccaatcaagttgtaaacggattctttcttctgaaggctctattcgataatgtttagcaatagttaagaccgcctgtagccaaggctggtaatttatttttgtcatcatggttgtacttcgaacccctgaattgaaatattatttaagccataggcttggcgggaacgtcctgttgcttcaatgtactgaacaatgctgctataaatgtcataacgtgctgattcgagttctgagttggcactatgaatagcttgttcagcatttaataaatcgaccaatgaacgcgtaccgagcttgtattgctcttgatagagttcacgtgtacgaaccgttgttgcttggcgacttgccaaaacctgcatttgacgctgtttattttcaatctgttcgcgacttgttctaatttggtccagaacatccatatacaccgaattcactttggcttttgcagcttcttcggcataacttgccatttttacttgtgaagctgtagcaccaccttggtaaaactgactggttgcttcaagcatgactgaactatataaaccgtcatctttgtcgttattcgggtttttaccattaatcgcctgacttaccgaacctttcacagccaaggtcggatatcgggttaaacgggtttgttgtttttgagcttttgcaacctcaacacctgcctgcgcggcaatcatttttggaatggtattaaactcaggttcaccataaagatcagattgcttcacgagatcatcggaaataatccatccggtatgactaacatctgcacctaataaggttcttaaatgctgttggtattgacgtaataatgattgctgagcaatcaaagcagactgcgctgcctgtaagtatgattgcgcctgaattgggtctgcttgactcgcgacaccagcgtttgcacgcaggttagcaatttcctgaatacgtcgaataccggcaatttgctgctcagcaattttattaagctgtagataacgctgaatattcacaatggtctgtgcaacatccaaagctagagtatcaacgctaaccaagacattggcttgttcaacctgaactttcgcttcttcaacatcaacacctgatttgactttaccgaagtcataaagcatttgagtagcacttaaggttaataactgccgacctcgttctccactgcttaaatcaccagtcgtaatccctcctgaaagctggggatagtaaccggctttagcaacgtcaactcctgaattttgacctgctaaagttgcaatagattgtgaaatatcggggctacgctgaatggcaatttttaccgcatcttgcaatgtcatcgttctagatggcaagttagaaaaagatgaagctcgattatcattaagttgaacagtaggaaattcctgcacaatagaacggtctagcttaaaattactaagcttgtgcattttggcaactttaaagtcatcactacttttagggacaaaaagttgtgacaagttctctttcagggtgtggtattgctcacttggcttagcagcgtatatcacgacaggtacatgtagtgtacttaaaagcataagccctttcaggaaagcctgctttctacatatccctcttactcttctttggttatatccaatcatgcttatcttgttgatcttgtttgttatcgtttaaaagcttctacattctacatagtttttcacctaaagcagcataattgatggaataaatcacacattattttttcattaaatgattgatatatgtatttgtttttatttataaaatactaaaaaataaaaaaagaggccttgacctctttttaaccaaacagattaatgtctttaattaaactgtgaaatcatcacctaaatagactttacgtacctgttcattgtctaaaatttcttgtggtgtgccttcggcaattaccgagccttcacttacaatataagcacgttcacagattgctaaagtttcacgaacattgtgatcggtaatgaggacaccaatacctcgatccttcaaggtctggataatatctttaatatcgcccactgaaattgggtcaacaccagcgaacggctcatccaaaagcataaatttcggatctgcggccaaagcacgtgcaatttctgcacgacgacgttcaccaccagatacactcattcccaatgaatctttaatatgactaattttaaagtcatttaataactcagtaaggcgctgttgacgttgctgtttattcaaatctttacgcgtctctaagatcgacataatattttcagcaatcgtcaattttctaaagatagaagcttcttgaggtaaataaccaatacccttacgtgcacgttcatgcatcgctaggtctgacatatccaagtcatcaagatgaatctcacctttatccatgcgcactagtccaaccaccatatagaaactggtggtttttccagcgccgttaggaccaagcaaaccaacaatctgtccactttgcatactaaaagagacgtctttgacaacccaacgcttactatagttttttgctaagtgtttaatacacaaagtttgcggttgttgaagagcttgctgcattagtcacgcgctcctgggaaactttttgaacttgaaggtggaataatgatttgtacacggtttgaagaagaaccttgagcttcaacatcacccttattcatactatatttcagggtgttaccgcgaatacttgaaccatcttggtataaatatgcaccgccagacaaggtaataatgcctgtatctgcattataaacaatcgtttgtccttcaccgcgtgcaatacctttatcagcacttatttgttgctgaaacttagacggtctacctttagcagtgatcgtttgaatttcacgtttagagtttagtgtagccacaattgagtcggcctgaagcttcatggtgccttgctcaatcacgacattacccgtataagtcgtcaaaccggttttttcattataagttgcacggtctgccactaacgaaatttgttgattacggtcagacggcaaagcaaaagtcgaagcagatgataaagcaacgaatgtaattaccgcagcttgttttaggaaagctgaagaacgttttaaattaagactttggtgcatactttcctcgaatattaaaaaattcgtactgaccattattcaaattggcttttagtcctttgctcacaaactcgccttgtggagactgaactgtcacttgatgattagtttcaatgtctctagtttttggataaccagttaattcatcggtttgaaactcaatggttccttgcggtgccaacttagtggctaccacgtcacccgataacacaaccttttgattatcatcatatccataagcttgtttagcaaagaatgttgcatcaactttacctaatttatacatagtggcattgagttgatccaactttgacgttttttgttgcatatcctgttcaagctgacgaacttcagcacgaatatacaaattgcctttgtcatcagtttgagtcaaatggacgccctgcgccgaataagtcatattcttcgccgaaccaatgtccagtttttttgccttgccactatagtagtagtaaccaccactcacagcagcaaccactacagcaacaatatataaaactctggtatccatgagcaggaatagcctacctttttaagtaatcttgttattaatgcggtactgcaagatatttttcaagaagttcttggtaaatgccttttgcgatcagcaacatatcacaaacttcacgcacagctccacggccacccatcgcctgtgttaccaaattcgcacgacggcgcacttcctcatgtccgtttggaacagtaacactcattccggcaatggcaaatgctgagagatccggccaatcatcacccatatataagcagtctgaaggcagaatattaaactgtgcacacgcttcacgtaatgccgagcctttatcttcacggccttggaaaaccagatcgacgcctaaatcggacatgcgtttttcaacgatattactttttcgtccagtaataatgatgactttcatacccgcttgttgcgcaagtttcatacccaaaccatcacgaatgtcgaatgatttaatttcatcgcccgtgttggttaatgtcacaaagccatcacttaaaataccatcaacatccagaaccaatgcctgcaaatgacgtgcttgttctaacaatgcatacgatgccattgattaattcacccctgcctgaataaggtcatgcatactaattacaccaatcactttgttctggtcatcgactaccacaaactgactgatttttttctggttaagttgttgtaaagcttctacagctcgggcttcttgagagatcgttgacggtttctttgtcatcacttcagacacaggtaaatttacatcaaacccttgttgtttatcgatgagacgacgtaaatccccatctgtaaaaataccgagtagatggtcttgttcatcaacaattgttgtcaaacctaaacgcttatttgagatctcgtaaagcacttgattcattggagtattaggtgaaacttttggtaactcgtcgcctgtatgcattaaatgttttacatgtaacagtaaacgcttacccaacgcacctgccggatgcgaacgagcaaagtcatcagcagtaaaaccacgagcttcaagtaaagcaactgctaaagcatcgcctaaaaccaaagtcgctgtcgtacttgaagtaggcgctaaacctaaagggcatgcttcgtcagactcacccagagttaaagcaatatctgcattttgcggcattgggcctttatcatcacgactaatcgtaataagaggtacaccaagatgcttaatgagtggcattaacatcatgatttcatcgctttttcccgagttggaaattgcaataagtacatcaccacgaacgagcattcctaaatcgccatgccctgcttcgccaggatgcataaagaaagacggcgtgcctgtcgaagcaaatgtcgctgccatttttcggccaatatgcccagatttacccatacccgtgatcacaacacgacctttgcattgtaataatatttcacaagcacgattaaaacggtcatcaatttgtgttgctaatacatctatggcttgttgctcaatacgcaatgtcgctaatgcactgctttggaaatctgtaggattaggcatacgagtttgactcaaaataattgatctgatctctggttgagatcggtgattttaatcaaaagatttgggggcattctagcataactcaatcagttacacgtttttaaatgtataagatttcacaagcttataaaattcatgcataaaactttgttaaaaatgatgcatcagttatgatgtaacactatttttgttgagtgtttgaaaacccttatgcaaccgtttgttttatataactctgagcaacgaaaaaaagttgaatttgtacctcgcaaagaaggtcacatcgatatgtacgtctgcggtatgaccgtttacgactactgtcatatcggacatgctcgagttatggttgcatttgactacattatccgttttttgcgtagtcaaggctggaaagtccgctacattcgcaacattaccgatattgatgacaaaatcatcaaacgtgcgaatgagaatggtgaaacaatccaacagctcaccacgcgtttcatcgatgccatgaatgaagatgcagcgaacttaggctgtttagcaccagatgaagcacctaaagcgactgaatatattgaccagatgcaaaatatgattggcaatttggtaaataaaggcgctgcttaccctgcttcaaacggtgatgtttattttgaagtcaccaaatttgaaaaatatggtcgcctctctggccgtaagcttgaggatatgcaagctggcgcaagtgagcgtgttgatgtagaagttgaaaagaaacatccttttgactttgtgctttggaaacatgcaaaagaaaatgaaccatcttgggcgtccccttggggtaatggccgtccaggttggcacattgaatgttctgcaatgtcgacttgctgcctaggcaatcactttgacattcatggtggcggttcagatttaatgttcccgcaccatgaaaatgaaattgcgcaaagtgaagcttcgactggtgagcaatatgtaaactactggatgcatgttggctttattaacgttgatggtgaaaagatgtctaaatctttaggcaacttctttacgattcgtgacgtaatggagaaattccacccagaagtgatccgctactttattgtgtcttcacactatcgtagccctgtgaacttctctgatgtagcacttaaagaggcaaaaacttctttaactcgtttctatcattcatttaaagcttatcaacaagtgtacggtcaaacgacaactgaagcgcttgatcaaagctttattgaacgctttaacaatgcaatgtgtgacgatttcaatactgccgaagcaatggctgtattgtttgaactgaacaaagagttaaaccgtgctgtaaaagaagagcaagctgaccaagcgactgtgctttattcgacattacgtcacctcaccaacattttaggtttggtacaacacaatgtagacgatttcttaaaatcagatattggacaagatgcacttgctttgtctgatgctgaaattgaagatttcattcaacaacgtgttgatgcgaaaaaagcaaaagactttgctaaagcagatagcattcgtcagtctttacttgagcaaggcgtagttcttgaagacactcgccaaggtacagtttggcgtcgtgctgattaaacgttcaattagatcacaagagtgttgacactttaatgaaacactctataatgtgctcacattgcgggaatagctcagttggtagagcataaccttgccaaggttggggtcgcgagttcgagtctcgtttcccgctccaaaattcaaaaaccacttaattcgaaagaattaggtggtttttttattggctgttgattagctttgactactcaaaatagtcaaaattcgcattaaaaaatgctttatatttccgtgccccttttgaacagtactatcaagaagaaggcagaaaaatgaatagtgcccgcttaattgttcaaatacttaaatgcctaaagaaaaaagaataatgaaaatataattaatattttatgattaaacccatcattaagtttttattgatattgaaattaaaaaatggcttaaaattaaaaattaggttaaaagtatattatcgcaaagtctcccccattgaggagactttctaagtattaaatgacttaaggatgaatttttttcaatccatcttctacagcaaatttagcgtcctcccactgtaagcgtgaactgcctttaacttgttcccatttagttttcaatttagattcaacctcggaaaaattaatttctgcattattatctacacgattttcataacctaaacgataagccgcccgataatcacgatcatattctagattcttgtcttcagtataatatggcatttttttatagttttctcgccaataattatcttcttcttgccagtcattactatcatctttttgattatttgtttgagctatatcattacctgctattgcccctaccacaccaccaataatccccccaacaacagcacctggagggccaccaacaacaccaaatgcagcacctaccgccgctcctcccaaggttcctgcacctgtagcaaccaaattctctcctgcttcattcatatcgggtacatgattgttattagtcggtcgagagtttaaatctggacgagcattatcaattgtggatgaaatatcttgtaatggtttgctatttgatacattaccattagaagatggctctttttgagtcgtatgattaccaactgaatttgattgttttgtatttaccattttcttactccctatattttaaaatctagtgtctttcaaaagagctagaatattaaaagaacttttgaagtatgcttgacaattattattataattcacctttaggttagttatgtttcataaatacccctattaagtaaggagatgttattaattaaagaaattatttctcatcaataaaaattcttattcaaataatcttcacaattatatcattctttatcacacaatcattatatttcgctagattaaacattacccacaacactctagttttacaccaccctgcaggaaattattattttatgtatatgcaatttaaaaaagcctagttaattaatactaggctttttaaatgcatttttaaaagataataattatatattatttcatatttttaaatatatcttcagctgcttttaggtgtttcgcaacagcatcacgtgtttgtacaagcatattttttaattcagaacttttcgtgtttggtattaactgcttatcaattatcgttaaaactttacggtgaactttaacttgactcatcatataatttttatcagtatctgatgttatttgattaagcttactaacaattttatcactatcattttgcaatgatttactaagattactggtttgtgaaatcaactgtaaccgacttgccaacgcttgtgcatttttttcattggctgaatgttctttaatcatcatttcagcatatttcttagcttcatccatttttagttttggcaatgcagtttttgcctgcttaatttcaccattattagctgtacttaatatcttgaaaatttgactatcagtcaaattttcatggttttcatttaatattttagagtgattcttcccatcatttatagtttgttgattcgctgccataatctcaaatgcactgaagcttaaaacaccactaattgcgatacagctaataattttcttcgttaaaatagctttcataccaatatcctttaacttaattcatgagtatttctacctatgggtagctttttcacatttccaatctatatccctacttgtaaattcaaggttggggttatttattcattatttcaatcaaccatatttataccgctcgttgaatattcttcgcaaagggtaaatagcttatttaaagtagatgatataaatttaataatgaatcatgcctctgtatccaatcttattaatgtaaatataaaatatatataattttaaaaaacattaacttaaaaaaatttttattttttatttttacgaaaataacaataaagctcgttatattaacttatagatactaaagctaaaattaaatatatttaaagaaaatttaaaccaatttaacttattcacccatctataaaaaagcgttctcctaaagactttaattcacacactgcacacaaacagtgacatgcacttttgtagatatcgtatgagctgtgcaacctgaaagtagaatacacagcgaaatcagagccttcatagtgaaacgcggttagcaatccagccataaaggaattgttcctgcgtgggatttcactcacaaatttcgatgtaacgttggccttgcatgatattaagaacccgaactaataccttctctccttctttaccgcgcttagccagtgttagcgaagaggtaagtaagaaataaagttctatcttccaacctaagctagccatttcctcctaacactcacatatttttagctaattcttttgccaaacattgttcatgccaagtggtttggaaattctcgacagcttttgacttaatgagagggtcttcaaataattttgaagaatatgcagatttaataagctcttgataaagttgtttggcttgttgttcttcaagatgattggcgatgtcatgtaactctttagctggcacttcatgttgtctagcatccatcacgccactcgctgcttttttcacagtttcgcagtaatgaagctccatcgcttcggatgctgcataacattgaattgaaattgcgcttataaagaggaatataaatctcataatctcaccttaatttgacgcgcaaggttagcaactaatctcccaaaatttaagttaaaaaaggttaatttttctatactcttattttatttcaccttttgcacttgagtatcagaggcttttagcacttttccatctgctgtgactggtgccataaatggaatttgctgacctgtatttttatcaattaacagagaatggcgctcaccactttcgaataagttgtgttctccccattgacgtagagcaacaatcacaggaaataaactctcccctttaggagttagcacatattcctgataagccgtaccatctgaagcatcttgcatttcgagaacacctgcttccaccaactttttcagcctgtcagaaagaatatttcgtgcaacgcctaagctccgctggaaatctccaaaacggcgcattccgtcaaatgcatcgcgcacaataagcagtgaccagcgatctccgatgagattgacgcagcgtgcaacaggacaaggttcttctttcatcaatgttgagttaggcattgagtttccttaccaataatcagtaacaagatatctagttgcattttaaaaccagtcaatctaatattcaactagttgcattttaaaactagattgaatggatttaggacaatgaaagcttctcttgtatcttcaaagtcttcggtagataacaataaaacgcattcgaacctacctcgtagcgtagttttactatttgctatagcaagtggtgtaagcgtagcaaatgtctattatgcacagcctttgctcgacatcttggcgagtgactttaatattagtcatgccgccattggtggtgtggttacagccactcaaataggttgtgcacttgccctcgtgtttttagtgccgttgggtgatcttataaatcggcgtcggttaatggctatacagttaatggctttaatatctgcattgctaatggttgcctttgcccactctacaattgttcttttgacaggaatgcttgcggtgggtctactcggcacagccatgacacaaggacttattgcctatgcagcaagtgctgcggccccacatgagcaagggcatgtggtcggtactgcacagagtggtgtgttcattgggttactgcttgcccgtgtattttcagggggaattagtgatgtggcgggttggcgcggcgtgtacttttgcgcagctatcattatgctcatgattgccttaccactttggaggcgactccctcatttaaatgttcagcctgttaccatgcgctacccgcaacttctagcttctatgttaaagctactgcgccaagaaaaagtcctacaagtacgcggtgtattagccttattcatgttcgcggcatttaatattttctggagcgcattggtactaccgttaagtgcaccaccctataacttttcgcatactgtaattgggtcttttggactgttcggtgtaatcggtgctctagccgccactcgtgctggccaatgggccgaccgcggatatgctcagcacacaagcttggcagcactgttaatattgctgctcgcatggtggccgctttcacttatgacctactcactttgggcgctggtgattggcatagtattgctcgacttaggtggacaagccctgcatgtgaccaaccaaagtatgatttttcgtactcgcccagaagcgcatagtcggcttgtgggtctatacatgctcttttatgcagtaggtagtggagtgggtgcaatcagcacaacagcgacttatgcttatgcaggatggctcggcgtatgtagtctaggcgcatgtgtgagtttattggcgttattattttggtggagaacgatgaagctataacccaagtattttaaaagttcgttcatctaattctctcaattcatccaaagtatagagccgcccctttggatcaaaaaatttatcaaaatcaaattgcccttctttatataacttataacgtttagggcctaaccattctttttggaaaaaattatcggtcagattaaaaaactctttgaaggaaatatttgcatctatttggcccattaactgagtccgctcatctttaggaatatctcgtacttttctttcatccataacgaaagatcggttcccaataagccttccatccttactgacaggaaccagaatacttcgacaattcggatgcaaaggtggcactcttttcgccgagtcattcagtttccaaatagaaccatcaacggctgcacagattttagaagttctaccatctaaaacactcacgaaccttacatattcaaaattaaaatttttgaagttatataaatagacctgatttgatatatggctacgtagcgttctaataattctttcaatatcgattttggtactgttgagcaatccatcttcgtacttaaggcgttttgtaccagtaatacgtttgatgatttgctgaggcgtcattccggtattcataccatcccgaatagcatattcaatgcgttgaagggcattttcactaatttgagctaaggattcatcaaccaaggcacctccagccaaaggcactcgttttattgactgataaagctgctctccctctaaatctttaataaccttaccaaatagtttggccatatagtttgactcatatatagccaaagcagttgccgaatgagtaaacatttccggtaaaacagtattaattgaattaaaccagttcgaaataacaagttggatgttttttagatgctgagttgtatactctccaccagcaagagcaaacttctcagtttcattcagctctttcattaaattgcttaaccgatcaagcataaccatcgtttcactattaaaaaacttataaagttcatttaccgatcgcgatgatgctcggtagagataagcttgatgctgggtaaagacatcaaaaagtgatttttcagtaatattcttcatgtaagttacctctacaaaggtgcactttatttttctttttatatcgctgttctataaaatttattaatagttttgagtagttaaaaagtttataaagctaattaaaatagtacttttgttttacaaactttttttgcacactaatatttctaataaaattagtgagccacaaaataaactcatctctatactcaaaacgaggaagtagacttaagtcaacttttatctctctttcagaaagaggcttagttaaacattcttcaaaatcaattttggtatattttaactttaaatcattttgttcggcttcttttctaatttctgccatcactctattgagattggttacagggttatccgtaatctggtacttttcatacatattttcgtatacattttcggcaatatctaaatatttaatgagttcagcattctcattcatctcttcatcatcctatttttttggaaattatgtaccagtaaatgtttctatacgtaatttaagattatttttatgtgaaaaatattttaataagaataacaatataatctccaacttattattttttatgtcattattaattctttataaaacatttccatatttactgacattttgataagttttatatgctgatcatttaagcttgttaaataaaaaaaccgccccagaaggcggtagctgaatattatcagccagatatagaagtaaggtggacaaatacttctatatttaagaggatattttattatttttaatgaaatcctcagatttaaagtagttaataatcatctcagcattttcttctttgcttggttcagcagccacaggaatttcggcttgatcaattttaaagccttttggaatatagtttgaaattggaggaagcttctctttccctccaattgtcattcgctcaataaagcctgcaagccacaaaatgaattcatcttcatttttaaacttgggcataagacttaaatcaatatgcactgatttttctttattaaattgatttaagcattcttcaaaatttataaaattgtacttaagtttgaactcagtacctttaattgctttgcgaatcaagctaattaaacaatttaaattttgaatggtatcttcagtaaataaattatcttttttaatttccttgtatactttctccgctatagctaaatactttggcatttcttcctcctcaatattattataaataattgaaaataaaaaaattcatcttctgattatgaagacttaattgtaattgagtgcaaataaatataaaacaatgtaagaactacccatattatgtaaaattgcaccataacggaacacaaatagtcaaactaatgttaaatgtttcacaattttatttaatacttttaactaattagaaatattttctttcaattgtaaatgattatttttcacacaacatgagtaataaattatcattaaaaacaatgtagaaataatttttataagtacctctcatgcttctagattcaccatactttagtcttttttcagtcataaatttgaagaaaaacttaattaaagatgaggttataacacctacccatctgttatatttttttgaaaaaattctgtatctatgattacaccttgcctttcttcatgatagtaactatctagacacgaggtagctaacatgagttttttaagaaagaaaaataaagctagttttgtactatttattattaccctctattcaatgctagggttcggcttaggttttattatttgggagtatttcctacaaattccataacttgagctaataattgatttttaaagtagccgttttgatggttctttgaaagataatgtttgctttacctttatacggctaaaccatggtggttaaaaaaataccttccaaatataaggtgttaatatttggaaggcactttgtaatcagctaaagctagtgtctcgtaatttctgcattaatttctaagcttatttctttactacgatggtaagctgcttttaaagccagccgaatatcatcagagaggttgcctaattcaaacattcgtaatgcagactctgtaataccattcgctaatgtgaccttgccacataactcactaggctgaacattacttttacgaaccatttctacagcgcctgatgcagcttgaagtattagatctaaagcaaattgcttatctagccccatagacacccctgttttcaccatactgtcgagaatatagaagaagtaagctggtcctgaacccgataaagcaataatcgcatcactttgggattctgaatttgcccaataggttcgccctgttgctgagtaaattgtttctatcacttctttatctaaaggctctaaatagtctgaaccaattaacacatgagtacctgtataggttaatacagggggattagaaatgactctgataattttttttgaacccgtaatactcattaattgtttaatattaactccggccatcatcgacacaatagttttatcagctaaccatttttttaagggcgccagtatagcctttaagtcttttgggtctagtaatagaacaactatatctgcctttttcacctcatgttgcttttgctttagaatgatttgattctcaaatttgacttcctctattagattaattttttctctttgaaagccttttaaaactaaacctccaattaaagctaaagacaaattactgctaccaatgaagcaaatattaggctgtactatattcaacatttagaattatttccttcctttagatatactacaaaaagaaatattatttatgacgtaagtcatgcaccgttaagacaagaaaaatttaataaattttcatgaatgttaagtttaattttacaacgattttaaattctgagctaagattactctttacttatgactttatgaataacaaattaatctaaattgttaaaaatatgtaattaaaaataatttttagcttatctcattaaagaaatagacttaccagacttaaagtatttaattaaaatttacttaataacaactttgctcttttttaaagaaactttcagctattctggaggcttcttgaaaattgatttcattacacacccaaaatgataaaagctttccatccaaatggaaatattgcttgtgatactccgttacatcatctgaatgaggatttcctatagagaaataattttcattattctttcttactttaccgtttaaaataccgccaatacaaatatccatttttataccagttataaagtcaacttatacaacacaattctaatttctatattatataaaacaaataatcaacttatttaattatccatataaaaaacccacaaaggaagaagtgggttttttaactatattgatgattagagccgtttaattgagcaaatcactacagatcaaatcgtctaaaatcatcaaattactttagtttaagcattcgtcacaattgtgatattcgaagcttgtgggccttttttaccctgtgttacagtaaactgaacacgctgaccttctaaaagaactttaaagccttgtgtttgaatctcagaaaaatgtgcaaaaacatctttaccttcatcagtttgaataaaaccgaaacctttagtttcattaaaccattttactgtaccagtagtattagacataaattaatcctaacttttaaaaacattatcatttattattgggcaaaccaatagaactaaaaaatacacattctacttaaatatctaaaaatatacggaggattataaataaaactgcgaaaagagagactttgggtaacatgaatatttttgtagttagtgtcgactatacacgcttcttaacgaattgcaatcgatatcttaattaattcatttcttattgaatacgaaggtatcaaattctaactttctatctgattttcaatgatatttaaatataattttctaacactgtatctatatattaattaaacatatttaatgctttttaaagtattggatttttaattttcaaattatttagagttaaaaaaaataagattgtgtaggaactttcaaatattatcctattaatttacttttttataaattatacatacttgtctgtatacataattcctattctgctttaaagtaggcatgcaattaacatattgatgataaacaggaagtatcaacgtgagcggtcttttagtttttataaccattgcctttcttactttatcaagcccaggcccaggcgttttatttacagtaacaaattcaataaattatggtgtgagaacagctttatttggcattagtggtttaattattggtatgtttattatcgctgtgatttctgcaagcggtgtcggacttattattactagcaaccctactatcttcactgctttaaaatttattggggccttttacttaatgtacttaggttataaaaattttattaaaaaatccccaactcaagacttattagaaactgaacataatgaaaaagatataaggaaatcaaagcttttctatcaagggttgtttgcctcactacttaatcccaaaacaattgtcttttttattgcccttttcccacagtttattgatattaaaaaagaaatattaaatcagtttttgattttatctttaacattctgcttgatcggatttttaattcatttagtttatgccaacttttcctctatattcaaagagaagatgcttgccggaaataatttttctaagctcaataaagtcagtggttgtatattttttcttttagcagttttacttattactcaataaaactattttatgaaagtgagccaacttgtaaggctataactcaatagctttagcaagttggcttttttataagctgatacgattagcaagccatccataaaagaattgctcatgcttcggatttgtttccgtaatttcaatatagcgctggccttgcataatattaagaagccgtaccagcactttttcaccttccttaccacggtttttaatatattttattaaagcctgcaaagtggctggcccatattcaccatctaccttaaggtctacccagtcttctttgccctgcctattcaataaatttaatgcacgttgtaaaagtggtttcgtgaaactaataccacaattcacacccgtgtcgaataactcttcagcaacaagtgcgctgatcaaattaacttgatcaaatcgcggctcaagccaatattgattcctataaatttctctggctgtctctaaggttaaattctccattgtaccttgataaccataactacgagcaacggcttgtgtaattccaaatttagtcgcatgcccatgatcaagtggatcatttacatagccaccttcgcgttttattagtgcatctaaatattgctcaatattcataagagttgtcctcatctttattagggccaaacagctattagctttggatatcatctttcgctttttttagatctttcatgacttcaacaatggtttttccttcttgtttattaatgaaattaaatatccacctcacaattgcccaaccaggtaagccacaaataaagaagaatccacctaaagtgatcattccccatatatctgtcacccactcatgtaaattccatttcatgataatgaatgagccaccagtcaagcttgaaacaaccgtacaaatcaaacccacgacccattcttgaggtgaacgtggaaaccgcataattaaaactactgcaacaactaagctcactgctaaaaccaccatcatgacagtgccatagagattaaaagcggcagctagcccatttgaagttaaaaaattttccataatttaatcctgcctaaagcgtaattttttgaaaaataatcatggctactgctttgttatttttcatatttttatatctaactctgctatgtacacagatttaatctagtcgatcttgttctttttaaaccgctatgaatgacataagcctcagtaaaactacaccgctagataacctctcttttttgaccaaaaagttgagataacaggttgccgtatatcggaaacttttgtgacgcattaaattctttgttagattcttcatgttcttgataccctttatcgacgaacattaagcctgatccacggaatcgggctttttttattccatttcttgtttttaatagtcggtacaaaccactcatcgactatcgccatttttatattctgtcgtccagtgaggcagaataatcgttactttcttaataaggtattgataaaattaagaaatcaatttcaaataaaatattattttcgttctatcaatatgtccttataactgatattataactatagttattattagtcaataactatagttgttttactaaatataacttaagttatatatttgttataagttagctggtgcgatcattatggctcttaaagaccgtttaaaagattcaaggattaaagctaaaagaacacaggcagaggttgctgaagcagtaaagatgtctcagcctgcttatcaagctttagaatcggggaagaatttaaaatctgcttttcttccactcattgcacagtttttaggtgtagatgcttattggcttactacaggaaactcagaagactcttttagagaaagtgatgtatttaatcctactgttgtgagtaacgatgcagcagaccaatatgtctggatcgaagtagttgaagcgagtttttcttgtggtacaggcgaatcaattgaatttcattttgatgcaattaacggaaaaattcctttccccgcttcattctttaaagaaaaacgtgttgctcaggaatgcatgcgtattatcaaagctaagggcgatagtatgaccgattacattaaagatggtgatctggtcggtattgatatttctcaaacagaagtaattgatggtgaaatctatgccgtttattttgctggtgaaggcatgattaaacaaatttttaaagaggcagatggctctttaattttgcatagtttaaatgaaaaatttagggaccgacgtgtcaccgaagagaacgggaaaaactttaaagtcatggggcgtcagttctggagagcaggctaatttagttattaaatatagctaaaataataataagacctttttaatcacttttgtctttttataactttaattatttaactttcttcttgatataaaaaaacctatctcatttaaaagagataggttttttcgctttattaccatgattttatcaacaatatgtatttaaacgataaagttgattaaacccagcatagaagctttttccatcttggtttaactcaatttcttcaccagtttgaagctgaattttctttccaacctcaacccaacgataaccatcaagcgagttttgcttacggacgtgaggaacaatcctcacattaatttcattgccatttacggctgtggcgatttgccactcatttactatattcacaatcattcactcatcactgagctcatgtgatttaacggtatttaattagaacgctagatttaaggtatggacaattcgtctagaatttaatatttagcttgatatagggttatttataagctaattgctttccatgatttcgtatcatgaaaagtagtacatcacagagcataatattttggatgcgggggtcggatttgaaccaacgaccttcgggttatgagcccgacgagctaccagactgctccaccccgcaattggaagtaagctttatacgcttatatattttataaagcaaactttattttttaatcggttgtaattattaagaattatctttttattaatttttctttttatccgttcaaattaaataagccccctcaatttcaattttaacactctaaattgttgtatttattttaaacagaacccgttattcatagacaacaattgccatgcttgggtagcttttatactatctagtctcaacccatcatttatagtttatatgtctgatcctcagctctctcttagtgaatatctcggtacagtgcaagaagtcatacgcctgacttttgacgagcctgtatgggtgagagcggaaattcgtaatttaaatgttaaaggtggacattattatttagagcttgcagaaaaagatgctgacaccgacaaggtcattgcaagctgtaaagcaaccatctggaaattttcagcaagtaaaattgttctcaagtttgaacgtgaaacaggtattgagttagctagtgatttaaacgttttaatcaaaattagagcgcgtttcgatccgcaatatggattttcagtcaatattgaagaaatagactcaagttttacacttggagaaattgcaaaacgttatcaacaaattgtagaacgtttaactcaagaagggttaatacataagaataaacttcttcctactccttttgatattcaaaatgtattagttattgctcctcaaaatgctgcgggtttaggtgactttaaaaaggatgcggatgctcttgagcgaaatggggtttgtcattttgtttatcaaagtgcgacctttcagggaaatacggctgccgtcagtcttatggagtcgttggcaacaggtttaaaacaatgggcaaataattttaactttccacccgacctgattgtaattattcgcgggggtggtgctgtaaatgacttagcttacttaaatgattatgagcttgccgccctcctctgtaaacgtagcgtaccgatttgggttggtatcggacatgaaaaagatcgtactatccttgacgagatcgcacaccgttcgtttgatactccaagtaaagtgattgcgggtattcgcaaccatattgttgaacgtgtacaagaagctgtagacaacctacaaacaatcaaactcttgtcacaacatcaaattacgacctaccaaagtaagagtgatcaatatctacaacatattaaatcctctgcccaagctcagcttaattcagctcaccagttccttgagcagataaaggaacgcattcaatttgtttcacagcaacaagttaaattttctttgtcgcaaactgaatcccttatgcgagaaattctcttgcaaaacccgaaacagattcaagcaaaaggttatgcaattgtaagatcagaaggcaaagcaattcgttccattcaccaaatcacaagctctaccattactgttgatatgcaagatggagcaattaacgctaatattaccgaggtaattccaaatgaatgataaagaactgacttttaaagaaggtcatgacattttaaagcgaaatgccgaattacttgaatctcaggaaagcccggatattgataatttgatgaagattgttgaagaatccattggtgcttataaagcttgcaaatctcgcattgaagcagtccagcaagctttagatgaaacttttaaagaataaatttccataaaaaaagcccatttctacttctcattgaagaaatgggcttagtgaacaccacttagtcctgaaatacaaaaatgtggattaggtcacatttttgcaaaaacatagtcccataaggaccccttggtgttcaagattttaattgtgtctatacgttagtttgcttttattttaagcaacactaaaacagatgaaaaaatcaattttccttcgcctctctataattcatcttcattaaacgggccgactaatttataaatttttccatcttttggattttcatagagtaaatccatattcggtagaataatatcgtcatcaatttcgatatgctctacacttttatacagctctaatttctgatcgttcgcaggtctaacctttgctaaagcaatactttcttggtcaaactgatctttaataacaacttttaatctcttcatgaaaaaactcctgtatattaaattttttaatataaattaatttgttaggtctaaaatgagctaatcgctgaatagccgattggcatggcaaaaaaagttaaaataaatgcagcaatacgttgtaagttacgttgatttaaccaagtgactttatttgagattaatactgtaccaaacataatccataaaaaagcaattggggtaattaaagataaaaagacaacaatgtgaataaaatataaatgaggaacttcccacgctgcatgtggaaaaatcgctgaagcaaaaagtaaagctttcggatttaaaagtgtcgcaagaaataaagcttttggtgtaataagcggtcggtttaaattaatatcttcagacgatgtcatccagagtttaaaagcaagatagagtataaagcccgcactcatcagctttaatatggctggaagccatggaatgaaatgagacaccgattcaagtaaaacaccccatgaggtaattgcgatcaggtaacctattacctctgccggaatcaacttaagagaatgctttacccctgcttgtataccagccgaggctaataatgtatttgttggtcctggagtcaacaaaatagtgactacaagtccaataaataaaaatgacaccataggcaaaaaactctattgattacgctaggcgaaatatgtcaaaaacaatcctgtattgtcgacaaaatcgttgtaacaagaaatattacaaatattttttattttttaaaatcaaattattaataaaaaatgaactcaagcttcactataaattattcaattttaaatttgcaaaatacgtcacataaattttaaaaaaaccaaatttaagttaaaaatagacttaatttatctataaaaatgaagtggttatttttgtatcttttttagacaaattctcacgtttttcatcccacaaaaaagaaaaattacatagcttgaaattatcaaattgatcaatatatatacacatgaaaatcgtgattttactgaatagatgtatcgttcccatcaattcattgatcgccgctttcatcgaattaaatagttgatggaggatgcatgatgaatgcttatgtacgccctcatcccgatggttttaaatcttatttaggaaaggatcagaaaaccggcctctatacagtacgggttggttggacagtatatgaaaccaatgccaatggttcagttttgtatattgttaaagaggaaagtaagattccactggatgtagaaaagtttaaaactgaccgacctaaaatctatgatgcgcttttaaatgaagtgcaatttcaacgcagaaaacaattggctattgatcttcaaaagtccaatattccctcttatgatcgtaaagcctacaaaaagcgccgcggctttacaggttcttaatttaatccacccatagtcaagtcatacagaaaaagtacccgtaggtgcttcttctttatcgaccagttgcaattaatacaaacaaactcagtattaaagtgcttaatgatcgtttgcagtgtacgtggacttcatgctcagctccgtgagcgtactgttcaatgttttccattacgtgtgcccttaaagttcacactaataatttgcctaattttcatacattaaaaaattagccaaaagtattatatccaaacaaattttattttttgtttttaggtatctcttcttaaggttttactgcctttttagaatttagctaacaaaatacctgtaacattcttatacgaggttaatctcgtattgagcatttgtagatctttcatttcaaagtgcccgataggaaaaatgattttataaaatgaaaaaagataacaatattcggttttttaataatagcctttcaaaaggagaatattaaaatgaatagctcacaagaaccaaatcaatctctgtttaatcaagcatccacctctattcaagcctgcattgaatgtatgtttgcttgtaaacattgtgcctctgcatgtttacaagaagagcatgtgcatatgatgcgtgagtgcatcaaacactgcttaacctgtgtagaaacctgtcagttatgcacatctttagaactaagacattccgaacttgctgaacaagccatgcagttatgtgctaatgcatgtcaactatgtgcagctgagtgtagtaaacacgaacatgagcattgccaggtttgtgcaaaagcatgtttagcatgtgctcaagcttgtcaggcatatcgtgcttaatttttagacgtgcttagaaacctacggcctattacgttcgtaggtttttaaactttatagaataaaggattaaatttttagatcagatgagtcattactttttttaggcataaaaaaaacccgcatcttggggaaaatgcaggctcttagatctcccacaacgaccatgagttcattattaagcttgaactttaaaccgttaactaaatgtacccttaataaaaataaattgcaatacagaatagtctgtatatttgaaatattttattatttttacattactttttcttaaatagtttaaaaacataagctatcccacacttagaaataacttttcataggcattaaaaaagcccgtttcacgggcttttctgcaacgttgagcactcaaaaaatgtgtctatccatttttatttgctctttgctagctgtttataaggtcttatcgtatcttttgccctgtcccaagtttccctgtggatcgaggagatattacgattaccttaagtacatttatagcacattatttattcatggctagtgctgttcacttttttttacaaatggataaaatacttcaaaccttcatatttcaagggttttcgacgccatttgggtactggtgagccgtatcacaaattggataccacttcacttgtgaattgacaaatgcatgagagatgactggcgtcgatatttcttcattaatgagccctacccttaaacgcaccacatcaggtttatctaaacgttcactccagacaggtgaaccgcaggttttacagaacactctctttttatttggcgatgcaaaatacgcttgcaaaagattttcaccctgtacaatctctaaatcgcttttttgtacttgagtgatggccgcaaaagcagccccttgtgctttttggcattgcttacagtgacaaaccatgatgggttctaattcggcattaatacggagttgaacaccattacaaagacaagaagctgtataagccatgatttttcctttttatttttataaggtttaacttacgcctacacctttttcaatgtggtctaaaatcgcacacgaagcctgttggtcaccacagcaatcatcagctgaagcctgcaaaatattaaccatttcctgtaaatgagcaattttttgctttaattcggcaatgtgttttacggttaaagctttcacctctacactatgccgatcggtatttttccaaagcgaaataagctctttcatctgttcggatgaaaaacctaattctctggcatgttttaaaaagtttaaagttttaaggtctgtttctgaataaatacgatagccagaagcagaacgctgagctgcttcaagtaaaccgatttcttcatagtagcgaatcattttcgctgaaatgcccgaatgtttggatgcctgaccgatattcatctcacacctcaaatattaaatttggtttaagacctgctgtcatgatcttaaaccaaaagttgattttcagcacgcttactgtactggcgcatgaaaacgttttaagcgtaacgcattgcctaaaacaaagaccgaagaaagtgccatcgcacctgctgcaaacatcggtgaaagtaatacaccaaatgctggatataaggcaccagctgcaattggaataagtgcaacgttatatacaaatgcccagaacaggttttggcgtatgtttcgcatagttgctttacttagcgcaattgcattcggtacgccttttaaactacctgacatcagcaccacatcggcagcttcaatagcaacatctgttcctgtaccaatggctaagcccacgtccgcttgtgccaaggctggtgcgtcgttaataccatcaccaacaaaagctaagcgaccatattgtttttgcagttggcggactgtgtccactttgccctcgggtaaaacctctgccacaacttcatcaatgttcagctttttggcaattgcttgcgccgtatgacggttgtctcctgtaatcatggccactttgagacctaattgatgtaaggcctcaatcgcagcataggttgtttctttaattgggtctgccacggcaataattgctgcaagttgctgatcaatagcaacataaagcggtgttttgccttcttcacctaactgagcagcaatcgcttggaatgagctggtatctaaaccaagttggtgcatataacggtctgcgccaatttgtactttttgaccagaaacttccgcttcaatacctgaacctgtaatcgagttaaatgctgttactggtaataagtttaaaccttcgctttctgctgcttgaacaatcgcaagagcaattggatgttcagacttggcttcgactgaggccactaaagtcagcacttggttacgttcaaaacctgattgcacattaaagtctgtcagtgtcggtttgccttcggtgagcgtacccgttttatcaactgcaaccacttgcgcttcttgtaaaagctgtaaagcttcacctttacggaacaagacacctaactcagccccacgtccagtaccgaccataatagaagttggtgttgcaagccccatcgcacaaggacacgcaataatcagtaccgcaacagcattcaccaagccaaaagtcagcgcaggctctggcccaaaaataaaccaaaccaagaaagtaattgcagcaattagcatgacagccggtacaaaccacatggtgactttatcgaccaacccttgaatcggaagtttagaaccttgggcttgttcaaccatgcgaataatttgtgaaagtacagatgagctacccactgcggttgcccgaatgtttagagtcccgttctgattgaccgtacctccaactacttgttgccctactctcttttcaacaggaacaggctcacccgtaatcatagattcatcaatatagctgtgcccttcaaccacttcaccatcgactggcacacgctcacccggacgaatttctacaatagttccactgaccatttcagcaacagcaacttcaaccacttgaccatcacgttgaatacgggctgtttttggctgcattcccaccaaatgttgaatcgcttgcgaagtacgtcctttagcttttgcttcaaaataacgtccgagtaaaattaaactgacaattacagcagccgcttcaaagtaaacattgaccgtgccttgtggtaatacctgcggcataaaggttgccacgactgagaaactgtaggcagctaaagttccaacagcgaccagcgagttcatatctggcgccaaacgccataaggctggaatccctttttggtaaaaacggcgaccaggaaaaacgagtattaatgtggtcaaaacaaactgtaaaagccagctattgtattgaccaatggtgtgcatgacccacatgtgaaaagctggaatgagatgtgaacccatttccaaaataaacacaggtaaggccaacacaatcgaaatgatcaaatcttttttaagctgatctaactctgaagcttttttatcgagttgctcatcttgatgtttttcagatgctttcgcgtcataacctgcttttttaacagcacgaattaagtcttcaacattgactgaggaatctgtttgtacccaagcctgctctgttgctaggttgacagttgcctcttgaacgccgtctacttttttaagggctttttcaacacgtgcaacacaagatgcacaggtcataccctcaatagacaattctactggtgcagcttttggaacatcataacctgctcgctcaactgctttaaccagtgcttcacgctgaatcggttgatttgaataaacaaccgctttttctgttgccaaattaacgttggcaatctcaatattttcaacttttttaagtgctttttcgacacgacctacacaggaggcacaagtcatgccctcaattgagagtgtttcactatatgctggcaattttgtggtttttgagtccatcaaatacctctgcaaatctgcaaaatttaatattctgtattgagcatacagattcccatcatgggaaggtcaagcatatttttttaaaaatttggtcttgaccttacaatcatgacaaggtttagactcagtgttatccaaacaaacatctcattcttgatggagtatgaatatgaaactacttattgaaaatatgacttgtggtggctgcgcacgtggtgtgactgcaacgattcaagatgtcgatccaaatgcaaaagtagatgtagacttagcgaccaaaatcgtgactgttgaaagcagtgaaagcgtcgataaaattaccgaagcacttgaagaagatggtttcccagcgaaagtgcaataagatataaaattgcatagcttcaacctttgaggctatgcacttcccttatttaaaaatcgataccatttgaatcatctatcgggttctgatcaagtgtaaaaacagttcgttgataaggtatcccttctaaatcataaacctgataaatacagtcgaacaatgattgtaagtcttcacttctgtccattgcccgtgcagtaataaaaattgggctgaccgcgccgttatctaaaatcggaatatagtttaagtgtggaaatcgaatggtatcggcacttgctggaataatgcagattccttctcccgctgccactaagcccaaagccaattgaatttctcgtatctcatgcatatttttgggaaccaaactatgttcggcaaaaatattcaaaagctgggttgagaagttcggtttcggtgaagtgggatacataaacatcttttcatcaatcaaatcggccagatataccccttctgtgcgctgtgcaattggatgactggtatgcgcggcaacgaccaaacgctctttacgtaaaagaattcgcctcacggcgggatcactaattcttaaacgcccaaacccgacatcaatacggccttcttttaaggcctgtaactgttcggttgtacttaattccatgagctgaatattcagatgaggctgctgctgacgaaataaataaatgattcgaggcagcaacccataaagtaaagacccgacaaaaccaatggtcatgcttctttcgatgagaccaatacgcttggtcatactttttatttcttcagcattcgacaaaagtttaacagcgtgctgataaaagaaatgccctgctggtgtggtctgtaaagggcggcttcctcgctcaaagagttgaattccaagctcactttccaaattttggatttgccgactcaaaggcggttgagcaataaataatttttcggctgccttggtgaagctctgttcttctacaacagccacaaaataccgtaaatgtcttagttccatcaggtttccatacctttaagatatattaaaatgcaaattcagtcttagacacagtttaaccattcttttaaggtatatacaagcaataacccgatgaagttatagatcacttgtatagcaccgattgaaatctactggccaacattcgatctatctttatccatgcgcggttaaacacccgacgcgtttatgcgcttcattgacatattaggatatcaagaccttttaaatcgtagcgaaggtcttgatgacttccaccctttggaaagtcggagaacggacatgccacgtattcctgtaatcaataccagccatcttgaccgtattgatgaattacttgtagacaatatcgatacaggtgaatttaaacttcaccgctcagtttttactgatgaagccttatttgacctcgaaatgaaatacatcttcgaaggtaactgggtttacttggcacacgaaagccaaattccaaataataatgactactacacgacttatattggtcgtcagccgattatcattgcccgtaaccgtaacggtgaacttaatgccatgatcaatgcatgttcacaccgcggagcacaactttgccgttacaagcgtggtaacaaagcaacgtatacttgccctttccacggctggacttttaataactcaggtaaattgctcaaagtaaaagacccaactgacgcaggttactctgactgctttaaccaagacggctcacacgaccttaaaaaggtagctcgttttgagagctacaaaggcttcttatttggtagcttaaatcccgatgttccttcgcttgaagaatttttgggtgaaaccaccaaaatcatcgacatgattgttgaccagtctgaacatggtttggaagttttacgtggttcatctacttatacctacgaaggcaactggaaactcactgctgaaaatggtgccgatggttatcacgtttctgctgttcactggaattacgcagcaacaactcaacaccgtaaagaaactcaagctgccgataacatccgcgcgatgagtgcaggttcttggggtaaacaaggcggtggctcgtatggctttgaaaatggtcacatgttgctttggacacaatgggcaaacccagaagaccgtcctaacttcccaaaagcagacgaatacaccgaaaaatacggtgaagcgatgtcgaaatggatgattgagcgttcacgtaatctttgtctgtatccaaacgtttatttgatggatcaattcggttcacaaattcgtgtacttcgtccactttcggtcaatcgaactgaagtcactatttactgtatcgcgcctaaaggtgaagcacctgaagctcgtgcacgccgtatccgtcaatatgaggatttctttaatgcctcaggtatggcaacaccagacgatttagaagagttccgcgcttgtcaggcaggctacgcaggtattgcccttgaatggaatgacatgtgccgtggttcaaaacactggatttatggaccggacgatgcagcaaacgagattggtttaaaacccatgttaagtgggattaaaactgaagatgaaggcctgtatctggcccagcatcaatattggttaaagaccatgaaacacgcgattgctacagagaaagaaattgctgatcagggagaaacagcatgagtactcaagacaaagcaactttagaaaatattgctcagtttctttatcgtgaagctcgctttttagatgatgaacaatgggatgactggcttgaatgctatgcgccagaagcttctttctggatgccagcttgggacgacgacgatagattaactgaagatccgcaatctgaaatttcacttatttattatccagaccgtcaaggtttagaagatcgcgtgttccgtattaaaaccgagcgctcatctgcaaccatgccggacacacgcacaagccacaatattgccaacgttgaagttctcgagcgcgacggagacaaagttactgtgcgctttaactggaataccttaagtttccgttataagacaaattacagctatttcggtatgtcacgttatgtgatcgatttttcaggtgatcaaccaaaaatcttgagcaagtatgtcgttttgaaaaatgactatatcaatcaagtcattgatatctaccacctttaagacatacccctcagctaaacggactgttggctgagggtaaaagtttcaaatattttgtaggatacatgccatgtcaaaccacaatgttgcacttcaatttgaagatggtgttacacgttttattaacgtagctcaaggcgaaaccctatctgacgcagcctatcgccaaaaaattaatattcctttggattgccgtgatggtgcatgtggaacttgccgtgcattttgcgagtccggtagttatgacatgccagaagaaacctatattgaagatgcattaacccctgaagaagctgcgcaaggctatattcttgcttgccaatgtcggccaacttcagatgccgtatttcagattcaagcgtcttcagatgtttgcaaaacagaaattcatagcttccaaggtacattggcccgcgttgaaaacttatcagactcaaccatcacatttgatattcaacttgatgaaggacaaccggatattcatttccttgcaggtcagtatgtgaatgttgcaattccagaaactggcgaaacacgttcatattcatttagctcaaaaccgggcaaccgcttaacgggctttgtggtacgtaacgtaccgaatggcaaaatgagtgaattcttaagcaagaatgccaaaactggcgacaaaatgacttttaccggtccattcggtagcttctatttacgtaatgtagtgcgtccagtgcttatgctggcaggcggtactggtattgccccatttatgtcgatgttacaagtgcttgaagaaaaaggctccgaacaacctgttcgtttagtctttggtgtaaccaatgactttgatttagttgctctagaaaaactcaatgagttgcaggcgaaattcccatggtttgaataccgcactgtagttgcaagccctgagagtaaccatgaacgcaaaggctatgtaacgggtcatattgaaagtgaatggttaaacggtggcgacgtcgatgtttatctatgtggcccagtaccgatggtagaggctgtacgtagttggttagaaactgaaaatattaaaccagcaaacttcttgtttgaaaaattctctgcaaactaacttaaggtggagaaattatctatgtcaaaccgtcaaagatttaccgataaagttgtgattgttacgggtagtgcccaaggtattggccgcggcgtggcattgcaagttgcagctgaaggtggacaagtcgtcatggctgaccgctctgaatatgttgaagaggtactcacagaaattcagcgtacaggtggtgatgctgtcacggttaatgctgacctagaaacctatgcaggtgcacaagcggttgttacaaaagccatcgaacattatggtcgggtagatatcctgattaataacgtaggcggcgcgatctggatgaaaccttttgaagagttttccgaagaagaaatcattaaggaagtgaatcgctcattgtttccaactttatggtgctgccgcgctgtgttgcctgccatgattaagcaacaagcgggcgttattgtaaatgtatcttccattgcaacccgtggtattaaccgtattccctactccgcatctaaaggtggggtaaatgccctaacagcgtctcttgcttttgaacatgctaaagacgggattcgagtcaatgctgttgcgactggtggaaccgaagcgccacctcgcaaagtaccacgcaatgccaacccgttaagtcaaaatgaaaaagactggatgcaacaagtagttgatcaaacaaaagatcgaacattcatgggtcgttatggcacaattcaagaacaagtcaatgcaattttatttcttgcatcagatgaagcatcgtatataacgggatcggtcattccggtcggaggtggagatcagggttaaccctgatctttttatatatttggataaataacatgaattgcatggaggcaatcacacatggcaaccctgttcaagacattaaaaaatgactggtccatatcagcaacagttgcgggctttcttgcagttttaatttcttactcaggcccactgattatttttttccaagctgctcagcgtgcccatgtatccaccgatatgatggtgtcatggatttggggaatttcaattggcgctgccgtttcaggtatttatctttcgattaaatataagactcctgtgattaccgcgtggtctgcaccgggtactgccctgttagttaccctatttccaaacatctcattgaatgaagcagtagccgcctatattacttctgccatcgttattttcttaattggcattacaggttatttcgacaaattactgaagtggattccacaagatgttgctgcgggcatgatggcaggtattctttttcagtttggtattagcctatttaccgcatctgatagcatgcctttgattgtctttagtatgctcattgtctttttaattgccaaacgtttaatgcctcgctacaccatgatttgggtgttagctgctggagttttattaagcctcattttaggcaaaatgaatccggttgatgtgaattttaatttagcaatcccccagtggattagcccggaatggacttggaactcaacactcaacctcgccgttcctcttattttagtcagtctaaccggccaatttttaccgggtatggcgattatgaaactgagcggttatgacacgccagccaaacccattattacggcgaccagtattgcctcgttagccgttgcctgtgtcggtggtattaccattgtacttgcctcgattaccgcggctttatgtatgggtaaagatgcacatgaacttaaagaaaaacgatatattgcagggattgccaacggaattttttatattttaggtggcttatttgctggcagtattgtcatgctatttagcttacttcctaaagagttggtggcagcactggccggtttagccttgcttggtgcaattgccaccaatatttctgttgccatgaaaaatgatggtcaacgtgatgctgcacttattacctttttagctagcgcatcaggtatgcattttcttggattaagctcagtgttttggggtatttgtattggtgtaatcgcccatttcattcttaccccacgctcaactccagccacaaattaattttttatctaagtgcccaccactaaaataaagcttcaaacgccaaatcaggatataaataattcgctatccctgatttggcaatttttatttaatataaattaaatttcatttttaagatgagtttctaaaataattgactttaatattttttatttatttccactttaattcctaatataaatttagctatatttctagctgttattctcagcaataaaatgtataaaagatttctataaaatccttaaaattctcacaatacaatatttaaccctatttcaaacataacagaagcaacaaccaaattattaaaataaaccatatttttcaataacttattttaataaaaatacaataccttaaagacataaagatatatcaattaggtttttgactctattccaataacaaaatagtttattaaaaaataacgcgatgcttcacaaattggaggtgaagaaaatggacacaagcaaggttaatattaatgagttaattgataaagcccgttttacatcttttcattggaaagttttaatctggtgcttacttattattatttttgatggatatgatttagttatttatggggttgctcttcctctgttaatgcagcaatggtcgttaactgctgttgaagctggtttactcgccagtgccgctctattcggcatgatgtttggtgccatgattttcggcacactttcagacaaacttggacgtaaaaaaaccatcctgatttgtgtcaccttatttagcggatttacctttataggtgcctttgccaaaggaccaactgagtttgctattttgcgctttattgcaggtcttgggattggtggcgttatgccaaacgttgtggcacttatgaccgaatatgcacctaaaaaaatccgcagtacattgatcgcaattatgtttagtggctatgcaattggtggcatgacatctgcgctactcggtgcatggctcgtaaaagatatgggctggcaaatcatgtttttaattgctggtattcccttgttactgctcccgctcatttggaaatttttaccagagtctctcgcctttttagtgaaatctaatcatagcgaacaggcaaaaaatatagtgagtaaaattgcgcctcaaactcaagtcaatgccaatactcaactggtgttaaatgaaagtacaacaacagatgcacctgtccgtgcgcttttccaacaaggccgtaccttcagcacgtttatgttctggattgctttctttatgtgcttactcatggtgtatgccttaggaagctggttgcctaaactcatgctgcaagcgggctattcgttaggtgcgagcatgttgttcctctttgcactcaatattggcggtatggtcggtgcaattggtggtggtgctttagcagacagattccatttaaaacctgtcattaccattatgtttattgtgggatcggcagctttaattctgcttggcattaatagtccacaatttattttatatagcctgattgcgattgccggcgctgccacaattggctcacaaatcttactctacacgtttgttgcgcagttctatccgacggcacttcgttcaactggcatgggctgggcatcgggtattggccgtataggcgcgattatcggaccagttttaacaggtgctttgctttcatttgagcttcctcaccaaatgaatttcttggcgattgcaattccgggtgtagttgctgcacttgcaatatttatggtcaatctaaaagcctctgttgctgcacaaacgccatcaacttttaaccctcaaaacacgcttacccagcagtaaacataaatgcgccgaggactggcgcatctttttggaaatggattatggaattcgtacaccgttttaaaccatgtaatttagcaataactacattattcggtttattaactagctcaagtttatgggcagcagacaccactcaacaaagcgaagatgaatggaagttcacgctaaaaaatgcctatatcaatcgtgattttgataatgatgcactcaaagacacaggcagttggtctcaggcagcctcattattttataagtcgaaaatgcatgatactccgttaatcatagcagacaagcctattaccattggagctgatgcttctgttcaatacgccgtacgcttgagttcagacaaacatgtcgcagatacagttttgccttttaataaagaaacgcaatctcaagcatctgattatctaaaatacggcgcaactttaaaactaggctacgacaaaacccttttaagtgtgggtgaactctggttggatttacctgtaacagctgtcgatgctagccgacaattgcttgcctcttattggggaaccaaccttaaatcgcaactttcagatcagctttatgccgaaattggtcgggttgaaaaagtttcgccacgcaatgaagaggactttaaaaagttttcctttacggcaaatgggattactaaagaatccgatggcctgaactacattgacctacgttatcaatttacgccgtcactcaagggtgaatattactttggtaacttagaagacctctacaataaacactatgtagggcttgagcataattggaaacaacctaattttgccctcacctctaagtttaaatacttcaatgcaaaagatgatggcaatacttttgatattgatgcgcaaaacatcggggtgctagaaacacttaaagtaaaaaatcatacctttggtttggggtaccagcagattatcggtgagtcggcttatccattaccggatggttttttaccagaaacttatttcattaactggaatgccactggcttctttaaagaagacgaaaggtcttatcatgtgatgtacggctacgactttaaagactatgtgcctggcctaaatgcaatggtgaaatatgtttacggtcatgactttaaagcagccaatggcgagaaaaaccacgaaaccgagtcgaatgtgattttaaactatgcgtttcagcagccattgttaaaaggctttgccctgcaatatattcgaattgattacaacgtaaaacatggcaatgactttggtgaagatcgcttgtttgtaaactacactaaaaagttttaattatttttgattcaactaaagcgggctaattttggctcgctttattatttttgtgccataaaaaaacgctcttacgagcgtttttaattaatctagtaacttaagcaacatgcttttgtacaacaatcgaacctactgaatagccagcgccaaaagatgaaatcacgccatattcgccatcatccacttcgtggcctgtacggtgtaaagcaataattacacctgctgaagaggtattggcaaactcatctagaataattggtgcacggcttagatctgcatctttaccagccacatatttcaagattaattcattcatgttggcattggcttggtgtaaccagaaacgcttaatatcgtttgcagttaactgcattttttccaattgcgcattaatgatttttgccaccaacggacaaacatctttaaatactttgcggccatcttgacggaataacttgtcgtcaaccactgcatcttcgctacggtttaagaaaccgaagttattgcgaatgttgtttgaaaattgagtgaataaatgaatatctaaaatttcaaaaccagttttagtagtggtttcttcaataatagaagcggtcgccacatcaccaaaaatgaagtgacaatcacggttacggtagtctaagtgaccagatgtaatctcaacattcactaataaaacacggcgagcacctgaacgaattgcatctgccgcttgtttcaaaccaaaagtagcagctgaacacgcaacgttcatgtcgtaagcataaccttgaataccaagtgccgactggatttcaattgccacagccggataagcacgttgcatgtttgaacaagccaaaattacaacatcgatatcttcagcagttacacctgcattttccattgcctgttttgcagcaataacgccccactctgcttgaattgaaagttcatcatttgaacgttcagacaaacgcggacgtaaacgtgttggatcaagaatacccgatttttcaatcacgtaacggcgcttaataccagaagctttttcaataaattcagcacttgaaccacgtaattcttctagttcgcctgctgcaattttctctgcattctcttggttatattgttccacataagcatttaaactgtcggccagttcttcattagaaatgatttctgttgggtgaaatagcccagtacctgtgatacgaatgcccatgtaaaactcctaaaaaaatgaatagggtctgttaatctttcatttataaattgcgttgccagctaaaaacaacataaacagaccccgatctattttaactgattcccaaacgatcccataacttttgtagtcgagttggcgaaataggcatcttggttttcatcggctgagaaaataaagaaatacgtaattcttccagcatcaagtacaattctttgattcttggatcatttttgaacttaaataccttgtccatccatggatcgacatcgtcaatagcagcatgatctcgctgtagattatttggcaatcgatctaaacgcaatagcagcgcttttaaataacgtggatattcctgccaaagatcaactggctggcaatagacaaaattgccgagtgacattaaatcgagttgatcttcaatatcatcgatactgcgtccaaatacgtccggatcaagtactaaaagttgacgacggatttgttgccactgaatataaatatcacttaattgctcaagtgcttgctgcccatagctcaaaaattgttttttgacctgttctagcagttgattaaattcatcagcattgattggcaaagtcgtaattgccatttgtaaagtcgcgtataccagcatttgctcaagtttagctttatcgcctaaaggtgaataagccaacgcaagaggtttcgaaatctgctttttcaactgacgaaccaaatcgccaagttgcatatggaccagacgaataataccttctcgatgctgtttaatcgcctctgcctgatcgttaaatgtttgtataaccacgccagactcatctttcgcctcaagttcggcaaaatttttagttggcactaaagcttgatattgtttaacaacaacccctgtcaccttctgtgaagcttcaaaggtaaagttttcagggaaggttttaaattcacctttttgctgtttcaccggacgatgcgtttctacgcgacaacgagccttcaactcagccaagtcacggcctttggcgatcaatttacctttttcatcaatcaccttaataaaaggcaccaaatacggatctatgcgttcaaatgaaaaatctttttccgtaatctgctcaccacgtaaagcaaacgccagatagctaaagatatgttgtcgcaaatgtacagcatcaataccttgcatgagcttacgcgccgtatctggaattggtacgaggttacgacgtttatcttttggtaaggctttcaataaggcttcaatgagatctaaacgccagcctggaatcccccacgaccaaatattttcatctacctgaggcaatgcctgtaccggaatttggaccgttgcgccatcttcatcatgacttgggtcaaagcgataagtagttgccaagcgtaactgaccattatgtaaatgatcagggaattgctgcgtggtcggacggtcattgagccaaagcgcatcatcttccacgtataaataacgcggattttttgcttctacggttgcacgccagtcttcaaaactacgacgactcgcaatttcttcaggaattttcgacgcatagaactgataaatcgtttcttcatcgaccaccaaatcgcggcgacgtaatttatcttcaactcgctctacttcttcaagtttaagcaagttgtgttttaaaaatggtggaactgtacccagatttcctgtggttaatgcatcacgtaagaaaatctcatgtgcagcaggttgatcaactttttcaaaattaaccaaacgcttcggttcaataattaaaccaaacaatgaaatttgtgcataagcatttacaataccggcttttttagaccaatgcggttcgaaatagtgatatttcaataagtcgcgtgcagcaagcaaaatccattcaggatcaatttttgctaatgtacgtaaatagacttgagaggtttccaccatctcaaaagccatcacccacgcagtattggttttatgcaaagtactggccggaaaaactttagccttttgctgacgcaccgccataaaggtattacgttcatcagttttattggcaatgaacgataataaaccggtcagcaacgcacggtgcaagttttcataatttgcaggcttttcattaaaactaagttttaaaccttcggccagctcaactaactgctggtgtgtctgtttccattcacgtaaccgtaaccaacttaagaaatgctgcttagcaaattgacggcgcttgttttccgacattcctgcttcgcctttaggatttaaagtatcccaaagttttaaataaaacagaaaatctgaatctgcctctttgaatagtgcatgcttttgatcagcttgcatttgtttatctgctggacgttcacgcgggtcttgaactgcgagtgcactcaccaccaccaaaatttctttgagtacaccaaaatgagcaccacccacaatcatacgtgcgagtcttggatcaatcggcatacgtgccatcatttggccgactttggtcagttcgtttttcttctcgttcagcgcgcctaactcaatgagcaacttacgaccatcattgactagacggaaatctggcggctcaatgaaatcaaagttttccagctcacctaaacctaagctctgcatttgcagaataaccgatgccaaattggttcgcttaatttcaggttcggtaaactcaggacgacttaaaaagtcttcttcgctatataaacgaatacacacacctggagcaacacgaccacaacgccctttacgttgatttgctgcagcttgtgaaattgcctcaatcggtaagcgttgcacgcgtgaacggtagttataacgagatatacgtgcaaagccgctatcaatcacgtagcgaatattaggaacagtcagtgcagtttctgcaacgttcgtcgcaataataatacggcggccctttccacttgggctaaaaatcttttgttgctcagaaacggctaagcgtgcatacaaaggtaaaatttcggtatgtctcggcccgtacttttgtaaggtttcctgcaattctcgaatttcttgctctgtacttgagaaaatcagaatatctgcatgttctggatggcctttttcttcggcatcagcaaagcattcctctacagcttgtacgactgcacgcggcaggttttcttcaaagtcatcgaactcgtcgtcatcactaccaccaatattcatttctgaaattgggcgataacgcacttcaaccggataactacgcccttctacttcaaaaattggtgcattattaaagtagttactaaaacgatttacatctaaagttgccgaagtcacgatgacttttaaatctgggcgttttggcagtaactgctttaaataacccataataaaatcgatattgagtgagcgctcatgcgcttcatcaataatgatggtgtcatatttagacaagaagcggtcatttcctaactcggcaagcaaaataccgtcggtcattaaccggacaatcgaatcttgcgagccttgttcattaaaacggattttaaaaccaattgactcgccgagcttttcgccgacttcttctgcaatacgctgcgacacactacgtgcagctaaacgacgtggctgggtatgaccaatcataccagtcaagccacgccctgctaacattgcaatttgagggagctgagtagttttccctgaacctgtttcaccagccacaataatgacctgatgcttttgaatcgcttctattaaacggtcagcatattgggttacaggaagatcctgatttaatttgatttttggtaagcgttcaaaacgctgtctaacttttgcattagactgttcaaataatttttcaatctctgcagtattggcttttttatctttacgtaaacgatttaaacggtaacgatctctcgccatcacccattgatctatatttaaaccattcagcacagataagttttcctgaaaattcaacaatcctctattttacgccttaatgaccataaggtaaaacaattggttttttatatatttttaatttttttacatttcacccttgaatttttagtaggtaagcttcatgttgttaggcaagtttcttttactataactgtcatttgatttacatgtttttgcagtcaaatcgaatacagtatttggggacttaaaaatcgaaaatttcatacttattcaattttccgattttagtcatgtaaaaatactatttccccaataaagaatttttatttattctacatctcgtaaacaagtttaaatataaacctcaatcatggagacaatgatgagcttgattaatactgaagttaaacctttccaagcaactgcttaccacaacggccaattcatcgaagtgaacgaaactaaccttaaaggtaagtggtctgttgtattcttctatcctgctgacttcactttcgtatgtcctactgagcttgaagacttagctgataactacgctgaattccaaaaattaggcgtggaaatctacggtgtttctactgacactcacttcactcacaaagcttggcacgacacttcagacgcgatcaagaaaatccaatacccattaatcggcgatccaacttggactctttctaaaaactttgacgttttaatcgagtctgaaggtttagctgaccgtggtactttcgttatcgatccagaaggtaaaatccaaatcgttgaaatcaacgctggcggtatcggtcgtgacgcatctgaacttcttcgtaaagtaaaagctgctcaatacgtacactctcacccaggtgaagtttgcccagctaaatggaaagaaggcgaagcaactcttgctccatctatcgacctagttggtaaaatctaatctctcttagattttagaaacctaaagaaccatcctttatcggatggttcttttgttttgaataagcacatcacattttctactgatacttttacaattctgcccttccccgttacctaaacattgagtaatgtcaaataaacaactggttaatttttgagtacgtttgatatgaaataaaggggtgcatttatggcgaatacagcggtcgtcacttcatggaaatacaatgcgacatcgcgtcatttaaaaattttttatagcgatggctcaggagatctctatcatcctgttcctgagtttgtttatgacaacttattgcgttcaaccgataaagccgcttttgtacacaaatacttagaatttaatttgcactttacccgactctctttggtgattgcctcataaaattataaaaaaggcctgttcaaaacaggccccaactggaatatgaaaaattatttcagcataactattttgtgaccactaaacacaaacctgcgccgacagacaaaatgctactcatgtaatccggatcttttttaattaaggctataaatcgatttacttctgccgcatgagatatcacattatcaacgactaaaaccccacctttaggcttcattaggcgttttaaatctggccaataattttcatatgcatcacgttcagcatctaacaaaataaaatcaaatttttcctgagctgcttttaagtaatcggctgcatctcctacccaaaattgaacaatttcactgagctctaactcagctacatgacgttttgcctctgcacttcgctttgcatcaatttcaactgtaatgacttgcccaccagtcgcttgggcagcttcggcaagccacaaagttgaatatcctgttgaagtgccaatttccaaaatagacttggcttgctgcatacgaataagctgggaaattaactgggcagattctacttctatattacgatatcgttgtaaacgatcggattgctgtgagtcatgctgtttaaaggtgtcatataaatcagcaactctttgtaagaaaatagtatttggcatctattttactccttctttatatgacagccgttttatttaagtactttgtattaatttaaaacgcggtacgacgctaccatcactcatttgcacggtttcagtaaacatatcaagtggtcgaacccaagttgaataatcaccatataaacattgataaacgaccaattcctcttcagtttcactgtgttttgctacagaaaaaacttgatagagattacctttataatgctgataaataccgcgttgcaatgacatgaaagtaccttttaatgttatgacataaaatctttacagccatataacatatataaattttcaaacactttcactttaaaatactgcaaaactaaaaatgaaattaagatgctcttttgtactttcttaacttacgcgttgttgcaaatcaacattcaaaaaaacgattaaattcataaaaacatactgttttacctattcattgttttaacgtactatgcatctattgaaaaaatttggatgcattggagtaaaaaacagatgttagatcaaaacattaaaactcaattaaaagcttacctagaacgtttagaaagtccaatcgaattagttgctgctttagatgaatcagacaaagctgctcaaattaaagaattagtaactgaaatcgctgagctttctgacaaggtaacagcccgttttgacggtaacaatacacatcgtccaagctttggtgtggctaaagcaggtgaacagcctcgtgtgttctttgcaggcttaccaatgggccatgagtttacgtctttgatcttggctttgttacaagtgtctggctatgcacctaaagtgtcggatgaagttttaaatcagattaaaggcttaaacctcaaagctaactttgatgtatttgtatcactcagctgtcataactgtccggacgtggtacaggcgcttaacctgattgccatttataacccgaacaccacggcaaccatgattgatggtgcattcttccaagacgaagtggaacaacgcaaaatcatggctgtaccgatggtattccaggacaatgaacacattggtcaaggtcgtatgacgcttgaagagattgtggcaaaacttgataccaattcagctgaaaaagacgcagcagcactcaatgccaaagatgcgtttgatgtattggtgattggtggtggacctgcgggtgcaacagctgcaatctatgcggcacgtaaaggcattaacacaggtatcgtggctgaacgctttggtggtcaggtcatggataccatggacattgaaaacttcacttctgtgcaaaaaacacaaggtcctaagtttgctgctgaaatggaagcacatgttcgtgaatacgatgtggatatcatgaacctgcaacgtgtcagcaaaatcactggtgcagaccaaacagcaaatggcttggttgaagttgaacttgaaaacggtgcaaaacttgaatcgaaaactgtgatcctttcaacaggggcacgttggagagaaatgaatgtacccggtgaagctgaataccgtacccgtggtgtagcgtactgtccacactgtgatggtccattgttcaaaggcaaacgtgttgccgtgattggtggcggtaactcaggtgttgaagcggcgattgaccttgcaggtattgttgagcatgtaactctggttgagtttgacactaaacttcgtgctgaccaagtcttgcaaaacaagttaaacagcttgccaaacaccactgtgattatgaatgcattaagcacagaagtattgggtgacggttcacaagtaaccggtcttaaatataaagaccgtgcaactgatggagagcatgtggtagagcttgcagggatctttgtacagattggtttacttccaaacactgacttcttaaaagacagtgaggttgagttaaccaatcgtggagagatcattgtcaatgaccgcaacgaaaccaatgtaaaaggtgtatttgctgcaggtgactgtaccactgtaccttacaagcagatcattattgctacaggtgaaggcgctaaagcatcactctctgcgtttgattacatcattcgttctgggcagtagaactggtcaaatcactatcatttaattcaagcctagcattacaaaatgctaggcttttttaatacgagagttacaactttttaacaatttttgatctttattaatcagttactttatgtttatattttagacatccataattttggatgccatgaattagaaggaaaaacacaatgaataaattacttgttgctttaggtcttgctgcgactgttgcccttgttggttgtaataaagataaagctccagaaactggtgctactacaggtgaacacttagaaaatgctgctcaacaagcaagtgctgatatcaaatctgctggtgatcaagctgcgagcgatattgcaactgcaacagacaacgcttcagctaaaattgatgctgctgctgaccacgctgctgatgcgactgctaaagctgcagctgaaacagaagctactgcacgtaaggcaactgctgatacagctcaagctgttgaaaatgcagctgctgatgtgaaaaaagatgctcaacactaattcgctttagcattaaaaaagcccctattgcttaggggcttttttaatgcttttgaaaattgcttatgaaattaaaccttcatcacgcattgcaatttgtacagactgacgttctgcaactttattacgtaaggcaataatatgtttatatggcgttaaatcatgctcaattgagtttgaccaatttgttaaaacaaataaatacgcatctgctggaccaaaattatcatttaccaaatagtcataatccgactcagccaaataattatcgatatattttaaaagacggtcgatttcagcataagcttttgttttttcatcatttgttaacggcgccccaaaaaataccgcgtatgcatcatgcaattcagaatttaaatagcccaaccattctaatactttcgcacggcctaagcccgaaggaggaatcaaatcttgtttagggtcgtgctgagcaaggaaaggtaaaatcgctacgttttcagttaaaattaagcccggattaatttctaaagctggtacatatccctttgggttaatttcataataatctgcacctttttctgttttatgtgtttttaaatttactcgttctaaatcaaaatcaacattaatttcatttaaaataatatgtgcagctaaagaacatgcgcctggcgaataatataatttcatatctgatccttgttatttcacattaacgttttaaattggttctaaaaaacctgcaaggtttgtacaattccttaattgtaaaaaagcgtaaatttataaattacttacactacctaatattcttgaaaaagttttcccttgcaagttgtcttgcgtgacgattgtttaaaatatgataaaacacattcacatcacgcatttttaccgttaactacgtttaaaaagctggctaatccattccattaattgagataagaaatcgaaaattggacttttctggttatcatttggctgattcgagtctttgccatttaaatctaggtcgacaatcacagggtcatggtccgaagaacgataggcatcttcactatagaacaaagctttttgctcatcagtcttatattcttcgttgtaatctagaaccgtcggctcgtcagcattaatatgccaagcaaaagtacgaactacttttggatataaatctgcatcagcaatagcatggtctaagttacccgctccaccattaccatttgcatcgcttgccacaccaaaaacataactgtacgcctgagcgccttgcccaactttagcgtcattgagtaagactttataattggctttttcaaatgccaaaatcggcgcctcttttgcataactattcatgtctccaacgagtaaagcattttgcttaggcacttgcgtcggattttttgctagccactgtacaatttgatcaacagcttttacacgggttggattccagcatccctgaccatcattttgatctgcattagaagagttggcatctactccactacatccttttgatttcaaatggtttggaataacagtaaatgttttattaccacgaacagcttggaaagtttgagctaaggttgttcggtttttatcacctaaatcaagcacaacagctttatttaaagacttcacacgcttgctgttataaataatcgcaacagcaataacatcattacctaaacgatccagattttcaggaataacatatttccagtctggacctagtgcactggttaaatgagcaattgcgctgtttgggccatagccattgttggcaatttccattaaaccgtaaacgtcagcatcaatcgatttgagtgcactcacaattttacggtgctgtttatcaaactctgcttgtgtgtttgcaccacgctctgttgggaaacctgttgcaccattgtcatagttcaagacgttaaatgaagctacacgaatatgattggcatttttcgtaataatattttgacgcgggttggtttgagcaataacttctggttgcgtacgtccaagcactggttgtacgcgccaaccgttaaaacgatattctaaaatcccttcgacatttttaagctggtagcctgaacgcaatgtattggcagcactaaaatttgtaggtaaccatggtgtacggttttgattgttataaccatcatcaaaaataattttagataataaatttttctgagctagagctttagcttcaggagatagcgctggatataaattggttggaatatataagcgacctaaacttaaagatagttcaccataacggccataattataattctcactcaccgttaaagtctgaggcaatttcaccaacatgccttgataacgctgcggagaatgggttgaaccgcctgttaagctcgaaaatggtagttcaaggctaattggctgaacctgatttgccatattgctattacaggtttgaatatcttgttgtaattggtcaatctgtagctgattttgatagctggttaaacggccacgtaaaataacctcatcaccaatttgtccacctttcaccgtactactattcggaatataaacaaaaatggcattgctcacatttgcacgtgctttcgtatcaggtgtttgaacataaaaacctgagaaaccatttgcataacgatagtcggcagtaattaccccacgcacggtataagtctggttttgtgctgatgttgctaaatcggcaattggtgtatctgagcttgaacagctgaccgtttcaataggaggctgagtagtagtacctgatagatttgtaaaatcatttcggtttgcccatgctgtccatgaatggtccaaatcaaatgccgctgtcggatcaatactcaaagctggattttcagtttcaatacgtttaaagctatttcccaagcttgaaacagcagttccccatcctgcctcaggtcgttccccaatacggccaaaacgatctacaggtgtgcctttataaacaagcacaactgcatcatccccattaaaagacaatgcagccacttgatgtactttattgccaagttctgtctgtaactctgaacgccccaccaaaaatttttgtttacttgcaagtgtaccttgtaaacggaaagtggctgttttcgcagtcccaccattattaaattgttgaatttcataatcggccaagttaacagtagtaccatccgggttataaatttctaacccttttttattattgctaccatcaacatactggctaaacatgagctgtgcttgagcaacagaactatatgaaaatgcacctaatgcacttaaaaaaaccgaaagtgtttttaattgaaaagttttcatgagtaaaaatgttcatgtgagttttaattagcctcttagattaaatattgatcatgacatctacatgaagaaaaacaccgaaaaatttgacttgaccacctgaagacttaaaataccgcatttgaatttcaatattgccaaggttatgtcgatcgatcagttagaaacgcaaattgcagaattggacaatttgcctgaacaccgtgaaattgtgacgtttatgcgtcgttcagccccactcaatacgtctcaacgcacggctttagaacaacatcgcgatttaattttggaatatcccgtgggtgacttacgtcagcacttcgagcatccagagcgccctttaactgttgaaattggtttcggtatgggccgttctttagtgcttatggctaaagcgaaccctgaacgtaactatgtgggtattgaagtccatgtaccgggcattgctcaatgtgtctatgaagcaggtatggcagagcttaaaaatttacgtgtactcgatgctgacgcaattcaagttttacgtgaaatgcctgacaacagtatcaactgcgtacaactttacttcccagacccttggcaaaagaaacgtcatttcaaacgccgttttgttattcatgagcgtatgcaactggtcgaacaaaaacttgagcttggtggtacgttccacgcagcaacagattgggaaccgtatgctgagtggatgttggatgtactagacaaccgtccagaccttgaaaacttggctggtaaaggcaacagttatcctcgaccagaatggcgcccagtgactaagtttgaacgccgtggtattgagtcaggtcataagattaatgattttatctttaagaagattaagtaagaaacagggcttagtaacaaactaggcccttttcatttcaatattaaaaattaaataaacctataacttatcttgtccatttttctggctaattaaagattgccaattgaactcaatctcgttatttatagaaaaggtacttgccatactaaaaatactaaggacaacacatgttaaaaatcttagggcgtgataattctattaatgttcgcaaagtcttatggctatgtgacgaattaaatcttacatatgagagagaagattggggaataggtttccgctccgctcaatctcctgaatttttgcaattaaatccaaatggtcaaattccagtaatcttagatggtgacttagtcctttggcagtcgaatagcattatacgttatctggcaaatgcttatgataaagaccatatactctacccaactcaagctaaacaaagagctattattgaccagtgggttgattggcaagctatagaactgaataacagctggacttatgcatttatgtcgctcattcgacattcagcccttcatcaagacccgaatttgttacaacaaggtattgatcagtggaataaacaaatgcagattctcgatcaacaacttgcaaaaactcaagcctatcttgcaggtactgagtttactctagctgatataccaattgggctgtctgtgcaacgctggaaagccactccttttgaccatccagcgcttaaacatgtcgaccagtattttgaacgtttaaatcagcgtaaaggctttttaaaatggggcaataacggtcaaccttaatctcttaaaattaagatgagtgatggcgctttacgatgccatcacttaaaagttgataaacctgttttaaatcatctcgatttgcttgggctaataagctttgatgcattaccaagatattctgatctccccgcattgcaggtcctgtttgcatttgctttggatcattttcagtagctttttttgctgtttccagaattaatgggtaaagcaagccaaagtcgacctgctctgcatctacaacttgctttgccatatcaaaacaataattactaaaattacaggcaaacacggctgccaaatgcaaagttaaacgttgtttggaggtatattgatatacacgcttacttaggctatttgctaaatcagaaagtatgactaaatcgtctttattggtcgcctctacaaataatggtgtggcttgccaatcaacgtctctttcaagactgaacgtttgcaaaggataaaacacccctgctttttcatgaatattactgatgacttgaatgtctgtgctacccgaggtatggaccataagcgtttctgggaatatctcatgtacctgcgttgcaagttcagtaatagcactgtctgaaacagctagaataattaaatcgcttggttgaaactcttgaagagactgacatgctttcgcttgaatttgctctgcaaacttcttggttttctcaaaatcacgtgcatagacttgtgcgatgtgatgaccttgagccaacagtgcctttgccaaatggaaggcaacacgcccactccctaacaaactaattttcatgccaacctaacaatatttatttctataaaaaaagcttctcaaaatgagaagcttttttcaaattagaattcaataaaatctgttttttattgagctactgaaaactcaatacgacggtttttaaagcgtccttcttcagtcgtattgtctgcaactggctgttctgaaccatggcctttagcaaccagtttagaagcatccactcctttagaaactaaataatctactactgcttgagcacgtcgttgagaaagcgctttattagcagcggcattccctgttgagtcggtgtgaccacctacatctaatttaacaccagacactttatttaaaagggttgctgcttgatcaagaatagctttgttatctgcaggtatgtcacttgagccactcgcaaagttaataatttgtaaattaagtgctttaactagtgcgtttacatctacattgttcgggtcaattgcagttaaggctgtttgtgaagcacttaaactattgcttacagactgttcagctgtttctggcgctgcggcaacaacttcggtatgtggaacaagtgcttttactttagcagttaacgcttctaacgctgcagcatcacctgctttcaatgtaatcttgtcacccacccattctaaagaagcgtctggaataccttttaatgcacccaacacgcctgctaaagcatccttatcggtaaaagcagccgcataagtttgacttgtatcaacatcacaatctttagtagctgaaaagacttgtttaacttgagtttgtaaagtcgccaagaaaccttgatcgccaattccagcctgacactggctcacagcacctttatcatcggtgcttaaagttaaagtagctggagcagccgcggcctctacaccgcttgcagctttagtttcaggtgcaggtgtagcttctttatgctggcaagagcgccacaaccaagcaattaataacccaagaataatgagcgcaataatgggtaaaaaaccacgagatttgcccgtagtctctgttgctgctgcaagtggcggtgctgtcgatgaagttacagaagataaaccagctccaatacctaatggagctaataagcccacggcccatcctggtaaatatgaacggatcgtttcagcatgctgacgtaaatagttcacaatactttgttgatcatttccggcaacgtcagaaattgcattaaggctcggttttaatgcgctattgagggtattttcgatttcattatttggtgctgtaccgcttaaatgggtaagcacagtattcttaatttgctcattatgagaaaaaagatcggataatgacggagccaaactgtttttcaattgtcctataagatcaggtttagcagctaataatgaaagtagaattggataaaacttagataaagcgtttgttttttcgccgaggtatccatcctgattatttaatattgttgaagatactttttctttaagcagttctatagggtttatcgacattggttattctcccgaatcttatacgtcgtaaccagcaactttttgattattcaaatacttctctttgctgatagttttttattctaatgcgctcgaaatcttttgttgttttttaaataatttatatacaattttccatctagtatttacaaaacaggtagatctttatgatctacctgtttatattttatatcggcattttgctgcttaaaattaaacagcaaaagtctgtaagactttacctgtaagcttttgacccagtaaaggggtgtttttcccttgagataaaatagtgtctttacttacagtccagcttaactcaggatctaccaacacccaccctgcttcagcttgccaacgtgctgtcatatttgctacctgtgcaggagcacttgtcactttagttacccattctaaaggttcaaataaaccttcattaatgagctgaatacccaaagccacataagtatcaaatgcagtaatacccggttgggtctctgcaaatggagccattttagctgaactgcttaaaggctcatggtgggtacagattgcatcaattacaccttgttttaaaccttggcgtaaaagctctttatcttgctcagaacgtaatggtggacgaacatgtgcaagtgaattgaagccatcaattagttgctcagttaaatgtaactgatgcattgctacatcggcagtaaccggtaaaccttttgcttttgcagcacgaattaattcgaccgaagcgccacaagacaacaaaccaaagtgagctttgacacctgtcgcttcaatcataagcagatattttgcaatcgctacggtttctgcaattgcaggaatcattggtaaaccttgacgtgatgcaataaagccttcatgagcacaaccatctttagcaagttgtggctcttcagcatagaaaacgacggttaaaccaagacccgcggcgtactctaatgtacgaacaacaacatcgtcattttcaaaagcagcattcgcatttgaaacagcagtacagccaccctttttaaggcctgccatatttgctggttgcttaccatttagaccttgagtctgggcaccgatgatatgcatgtgaataccaccatcatgccaagctttttcaattaagccgtgaatgagcgcaccgttgtcttgtacaatcggctttgagtctggcggcgtaatgacgtgcaaaataccattagcacgtgcagctttaccttctgatttcaacgttccatgctgctgctgacctggttcacgcaaacgtgcacacaaatcaaccatagttggcattaaccatttaccctgaccatcaatagtttgttcaacctgatcgactggggcaatgagcttaccatcttgaagatatacagtttgtacgctgtctgttttttggattgggtctaacacacgtacattttcaatttttacaatactcatgtgatccattccttacaacgcaatcgcttcaattaaaccttgttcttggagttgcccttgcatagacaacgctagcacagccatacgaactgcaataccgttagtgacctgttttaaaatcactgactgttcgccatcagcaatactcgaatcaatttctacaccacggttcattggtcccggatgcataacaatacagtccggtttagccaagctaaggcgctctttgtttaaaccgtacattctgtaaaattcagattgtgaagataatgctggtgaatcgatacgttcattttgaatacgtaaagcaataatcacatcacaaccggtaatgccttcatccatgttattgaacaaacgaacatggtcgccatattctgaaaaaccaaccggtaataaggtgttcggcgcaatcacacggatatctttacatccgagtgtttgaagtgcagctacatctgaacgcgcaacgcgagagtgtttaatgtcaccaataatggcaacactcaagtcttcaaatggttttttcgtctcacggcgaatagtgagcatatcgagcatcgcttgcgttggatgggcatgacgtccatctccggcattaataattgcgactttcggacatacatctttagcaatgaaatgtgcagcacctgaagatgaatgacgtacaacaaaaatatcggcagccattgcttcgaggttccaaagcgtatctcgtaaagtctcaccttttgacgtgcttgaacgtgcaatatcaatgttcaatacattggcagacaaacgttttgctgctgcttcaaaagtagtacgagtacgggtggagttttcaaagaagagattcataaccgtccgaccttctaaaagcgggcggttaattaaattattattatcatctaaaaagctttgcgcggtatctaaaatcttagtgaggttttcttttgaaaggccctcaatcgttaaaaaatgttttaaatttccgtcttgattgagctgaacctggctcggttgatgcaacgctgcaatatgcataatggattcctatgggtcgaatcgcgaaaacgtgcatagtgtagctgaattccgttcttttcgcagaagaactttacagaataaggccctaaattgaccagaaaatttagagccgtgctcagattaccttaaagcaccaatataatgatgtggcacttgtgcccgataaatgtcttcggctgtgatttctgattcttcactagtttgaatacttactgtcatttctttttgagactgctctggtattgaatccgtcaataccattaatcgttcaacacagcgttttaattcgtcatcttctgcttctagtgccagtgcaattacatatttcgcatagtctttatttcgaacaacatacattgcatctatcacccgtcccgttactctgcgcatacgcacataaatttgagtagctagtgtgaaagcttctgcattcgctataaaaccattccccatcatatctttcatttatattcccctatgtattcaaatcatgaaattggttaaaaaccatcaataatgattaattaaataagttttatttcgaaagatttagcaaaatacataccagtttttatattttaagctttaaaaatcaatttattggttgccaagtgataggttgcaataatttaaaaacttttagacaccaaaatacgttaaactttgcatcgttaatatttatatgttttggtcaatcgagtttatgaatacctctttacgtttaaaccactattggattacttgtgctgatggtttagaaaccctcttacaagaagaaatagaacagcttggcaccaaagtgacagaacgtaaagcaggacgtttaatcattgaaggaacgcttgaacatgcttaccgtatttgcatgtggtcacgtcttgcttcacgtgttttacttccaattcatacttatgaacttgaacgtacccacgatgcacgtgatgtagcagaagagctttatgaaggtgcaattagttttgattggtcacttatttttgcaccacaaagtacctttgcaattcgcttacacgcagagcgtgaaattaaggtaaatacgcagtttgcaacccttcgtgtaaaagacggtgttgttgattcctttatggaagctgtaggtcgccgcccaagtattgataccaaacaaccggaaattacattatatgtgcttgcgggcaaaaccgagcatacatattgcctagatttatctggtgattcattacataaacgcggctaccgtcgtttcatgacagatgcgccaattaaagaaaacctcgcagcagcaattttacaaaaagccaagcttaaggaacgtaacccggaaattgtacttgacccaatgtgtggttcaggcacatttattattgaagcattaatgattttaactgatcgtgcgccgggtcttgtacgtcgttttggttttaatggctggcatggtcatgaccgtgaactttggctttcactcaaagccgaagcagcagagcgtcatgaaaaagcacttgaacaaccgttacctaagttttatgcatacgatgctgactgggaagctgtaaaagcaacacgcgaaaacattattgcagcaggttttgaaaagctactaggcgatattcaaattgaagagcgtactttagcagactggccagatttcggtgctgaaaataaaactgcttttatcgttaccaaccctccatatggtgagcgcttaggtgacaaagcttctaaccgttctctttacttaggcttatctgccctcttacaaaagaacttcccaaatcaatatgcagcaattattgccgcacaaattgaacaagcggatgttttagcatttgaagcaccagaaacattacgattaatgaatggtaaattaccgatttatgttcgtttcggtacagttaaacctgaaaaagtcactcaacccttcttggcaaactggcaagctcaacctgttgaaatggaagaagctcaagactttgctaaccgtttgcaaaagaacatgactgccttgaaaaagtgggcaaccaaagaaaatatctattgcttacgtttatacgatgcagacctccctgactttaaccttgctgtagacttatacggcgaccgtttacatgttcaggaatatgcaccacctaaaaagattgatcctgaaaaagcaaaaaaacgttttaacttagcgcttgctgctattcgtgcggtgacaggattaaatcgtgatgcaatctttattaaaacacgtgcgcgtcaaactggtaccaatcagtacaccaaacaaagtacagccaataaacgtttcatcgtgcaagaaggtaaagctaaaattttagtgaacctaactgactacctcgatacaggtttgttccttgaccaccgtcaaatgcgtttacgtattgctaaagaagcacgtggtaagcacttcttaaatctttatagttatacctcgacagccagcttacacgcggccttaggcggcgctgcaagtacaaccagtgtagatttatctaatacttacttgagctggtcaaaagaaaacttcgttttaaatggtttaacagtagatcatgcagacgagcagcatatgttctttgcaagtgactgttttgaatggttaaaagaaggtcatgaacaatacgatcttatttttattgacccgccaacattctctaactctaaaaagttccacggtacttttgatgtgcagcgcgatcacgtctctttgattaaacgtgcaatgaaccgcttaacaagtgaaggtacactttatttctcaaataactatcgtggttttgagatggatgaagagatcgaggctttatatgaagttgaagaaattacttctgaaacgattggacccgattttaaacgtaatcaaaaaatccaccgtgcatggaaaattcagcatcctggattaaattaatctgaatttgaaaaggaagttatcattacttcacggtaatgataacttcaccatgtacattctttgactcaaaatcataacgcgtaaatcgatcagctctttctggcagagcaaccatttctaactttttcttctcttttccatcaatgacctgattttgcttttgttcttgataaggtgataacacacttgtgcgcagtgaattccatcgaacctgctgtaaatagttatcccctagtgtttgccgaacttgacgttgctctatttctggcttcttcgcatcatcttgagctttcgcaataattacgggtagagctgccgttactgctcctgtttgagttgcaagcgcactttcattcataggctgtgcagcccatagattcgtcggtaataccgctatacaacttaaaattcccagcacacacccttgcttattgttcatcatgttcatcctaaaattgttattgtttgttatatcgaatcaaactaacaagtttttaaccttgtcgcaatgttataaagaaacttcccgataattagcattgatcattttaaaacctgaaattcttcacaggctttttgtgaatattcaaatagttttatagatttttatcttagacttgaaccatacccttagatcacttaacgtgattttataatttatttgtagttagatttattcataaataaacaccatacgaggtggaataatgcttcagcaatgctgtcagttattagaagaccgtttacttaaagtcgcgtttattgaaagtgccagttcaggttacttaaccagtcagttttcgattcataaaaatagtggtgctgatattttactgggtggattagtcagttatgaccccagtattaaaatcagtgttttaaaagttgatccaaagttaattgaaacctacacagcagaatcgccacaagtaactgaagaaatgtgcaggcttggtcaaaccctatttcaacaagccgacattgttgtgagctgcacaggtttattaaaacctggcggaagtgaaactacggaaaaacctgtaggtactttctttatttgtatttcttatctaggacgtatttatcattaccattattttttatcaggtcatgccgaacaaaaacttaaaactctcacacagaaagtagcagactcaattattgcgcttatatcttcaaatcagcataaaagttaaatataaaaaaagagaatatgtttccatattctcttttcggttttagcagaaaaaacttagctgagtttcagcttatcaaacactaagtgaccattttcgcctttaactaaaatggtatcacccgcaacaaagtcacctgacaagattttttgagctagtgtattttcaacctgttgttgaattgcacgtttcaatggacgcgctccgtatacaggatcaaaaccagcgtcaatcaataagtcaaatgcactgtcatctacagttaaactcatatcacgatcaacaagtcgtgagcgtaagcggtccaactgaatatcggcaatgccacgaatctgtgcttttttgagtgaatggaaaatcaccaactcatcaatccggttaataaactccggacggaaatgctgacttaccgcattcattacaatagtacgcacttcatcatcagttgcaccttcaccaagttcacgtacatcttgtgaacccaagttcgatgtcatcacaataaccgtgtttttaaagtccactacacgaccttgtgagtcggttaagcgtccatcgtctaacacttgtagcaagatattgaagacatctggatgcgctttttcaacctcatcaaacaacactacgctatatggtttacggcgaacagcttcggttaaaacaccgccctcttcgtaacctacgtaacccggaggcgcaccaactaaacggctgacagaatgtttctccatgaattcactcatatcgatacgaatcatggcatcatcactgtcaaacaagaagttagctaaagctttagttaactcagttttacctacacctgttggtcctaagaacaagaatgatccgctaggacgattcgggtcagacaaaccggcacgtgaacgacgaactgcattcgataccgcaacaactgcttcatcttgcccaacaacacggtcatgtaaaaactcttccatatgaagaagtttttcacgctcgccttgcatcattttagcaaccggaatacctgttgcagcactaacgacttcggcaatttcattttcagttacttttgtacgaatgagttttggctcttcgttttcttcagcaacttcatcttgttcaagttgtttttgcaactctggaattacaccatattgcaaacgtgctgcttctgccaaatcgccttcgcgctgagctttttcaaaagcaatacgtgctttatcaagttcaacctgagcttgtttagtgccttctaccaatgttttctcagctttccacacttcttccagatcgttgtattctttctcgacttcagcaatctgtttttcaagatgagtaacttcggccttactgcctgcgtcttcatcttttttcaccgcttccaattgcattttcaactggattaaacggcggtcaagtttatcaagtgcttctggcttagaatcgatttccatcttaatacgagaagctgcctcatcaatcaagtcaatcgccttgtccggtaattgacgatctgtaatataacgatgagacattttcgccgcagcaataatcgctgaatctaaaatctgtacgccatggtgagtcgcatacttttctttcagaccacgtaaaatcgcaatggtatcttctacacttggttcatcgaccagcactttttggaaacgacgctccaaggctgcgtctttttcaatgtattggcgatattcatctaaggtagttgcacccacacagcgcaactcaccacgagccaacgcaggttttaacatattacctgcatccatcgcgccgtcacctttaccagcaccaacgagcgtatgtagctcgtcaatgaataagatgatttcgccttcgtgtttcgccaaatcttttaaaacagcttttaaacgttcttcaaactcaccacgatacttagcacctgcaagcaatgaacctaaatctaacgataaaacacgtttattctttaagccttctggtacttcaccattaacaatacgttgtgccaaaccttcaacaatagcggttttacctaccccaggttcaccgatgagtactgggttatttttagtacggcgtgacaagacctgaatggtacggcggatctcatcatcacgtccaatcaccggatcaagtttccccgataaagcccgctcggttaaatcaatcgtatatttattaagtgagtcacgttggtcttcgtgattattactcatgactttgtcactacctcgaatattttcaattactttgcgtaagctgtcgggagttacacctacggcacttaaaatattttttgtttcaccagtttctgccaagcccaataaaacccagtcagttgacaaaaattcatcgccagctttttgcgcgtatcgatctgccaagttgagtgctttaactgcttctgggtttaaattgacatcgcccgtcgggttagcaatagtcggagcatcttttaaagcctgctctagcttttgtttaagttcaggtaaccgtgcacctgcttgttgcaacaaactaatattggacggctcttccaataaagtactcaaaatatgaatacctgctatagctgtatggtctttacccatcgctaaggattgagcatctgagagggcttgctgcaagcggttcgtaaatttttcaaatcgcattcttgttattcctcacaacaaattcgtacttgtgtaatagatgggaacactttttcggatttcaaataaatttttatatatttttcattaagttataaaaaatactgcgagtaaaactcgattataatatgggtttgttttgtatatatttcaagtacacttcggctacattttattaaatatcttgaatatttatatttactctcatctattttatggtcttcacaaagacttcattgagaattcccaaattaagaattaatttatcttgccaattccatcctgttttttgaaattaaaaatgcgcttaaaacatattatattaacaacttgtctttttagctcgactctagcaatggcggagttaccccaagactcaagaagacccggtggtattgcagttattcctttaacgtcggatattactcaggtcacttttcaacacaaaccggttttaattagccaagaaggacagcagcgttatgcagttttcggtattccgttatctactccacttggtagtgttcaactcgataccaataaagcccctattcaaatagaagttaaatcttatccatatgctgagcaacgccttaaagttacgaatcaagactatgtaaatcccaatcaaagtcaattagatcgttacgctcaagaagctaaagaacaaaatgatgtttatagttcatttacgcaaagttcgtggcaagccttaccaaaatttatacgcccaacttcgggtaaatttaccaattcttttggtagaaaacgcttttttaatggtgaagaacgtgctccacactcaggtctagacattccagcaccaataggccaaaaagtagttgccccagcagacggcgtagtcgttcaaacaggtcattatttttttaatgggcaaactgtattaatcgatcacggccaaggcttaattagtatgttttgccatttaagcgagataaaagtagaaaaaggccagcatattcgtcaaggggaaactttaggtctagtcggtaaaacaggacgtgtcacaggccctcatttacattggggaatgagccttaacaatgcacgggtagaccctcaactttttctaactacgactcattaatttaaagctttacgaaagtactttggcgcttcgacatagccttctcttaggtaaaattgatgtgccaaaggtctttgtatccccgaatgaagttccattcggtcacaaccacgttgctttgctaaccgttcggcttcttgtacaagcaaatgccctactcctttactacgcatcttctcgtcaacacacagataacatattttggcaaactcaccttgtaaggcaatttgtggaataaaataaagcgataaaattccatacacttttaaatcgtcagctgcgaccaacgtaatcgcattaggatctttacttagtatttgaaattgttcttgaactacttttaaaggctgtgaatatcccatttgtttaagtaaataacatatggtctcggtatcttcccattgtgctaaacggatattcacataactctccttttattttttaattattcttatcataaaaaaagccaacatgactgttagctttttattttttaggcattcacaaataaaattacgctgcttcaataatttcaaaatcgtgagtaatttctacgccaccatctgaaagcattttacttgctgaacaatatttctcagctgatagctctactgcttttgcaacctgtttttcttttacagctttacctgtcactacaaagtgtaaatggatcttagtgaaaactgccggaattgcatctgctctctcagctttaagctgacatacgacattcgtcacatcttgacgggatttctttaaaatagtcacaatatcaaacgaagcacacccaccaagtcccattaatatcaactccataggacgtggtccacggttttcaccaccgtactcaggtgagccatccatcactacactatgaccgctctctgatttcgcttcaaaagcaacattctctagccaatgtacacttgtttgcattgcaactacccaaaaaaaattataaatttaagcagggtctgttgacatttcatctatggattgcgtaatagctaaaaattaatccaaataaaacgcaaaacacagacaagggcaatcctttgtccagttttgtaataaagtttgttaaatttcagccggaatctgaggtgcaattaaagcatctttgatgcagcgcaaggccagattttttgttcgtttcgttgttaagctctattgatttagaatgactaaattccatagttcttgcttcgtaacgtccagaaaaattgtcttatgtcgcaaccatctgtgaaatgtcaacagacccttgttttgtacactaacataaaatgagttgataaggaatttcatctcttctgtgtaatagctcatctcgagcttgtgtgaattgtttaccctattcggaacatatcaagcatgacttcaaatttttcacaactcagcacagatgctttatctccggggcaactacctgaatccgttaaagcattgttaaaacgtgctcacatcaacagatatccaaaacgaaccacaattgttgatgccggaacagagtcaaaatctttatatttaattttaaaaggctcagtttcaattattttacgtgaagacgatgaacgtgaaattgttgtggcatatttgaatcctggtgacttctttggggaaatggggcttttcgaaccgaaccctcaacgtacagctgaagttcgtacccgtgatgtctgtgaaattgcggaaatttcatatgacaacttccacgaactgagcaaacagtatccagatctcagctatgccgttttcgcgcaactcgttcgtcgtttaaaaaatacaactcgtaaaatgaccgatcttgcatttattgatgtgtcaggccgtattgcgcgttgcttaatcgacctatcttcacaaccagaagcaatgatcttgccgaatggccgtcaaattcgtattactcgacaagagattggacgcattgtcgggtgttcacgagaaatggttggccgtgtattaaagaccttagaagatcaaggtatgattcaaactgacggtaaagctattctaatttttctctgtacacgataaaaatagataactcattgaaataatgtcataataattgttttctaacgacgaatactatgacacatctcaatgagttatatcttatcttaaacaaatatctaaaatggaacaagtcacatttaaagtgctttgcgctcatcatgcttgtgattattttaaagcaaacatgtaatctttcttctgcatctaaagccttgcccatcaagtgcttaccacaatcattttatcgacgtatgcagcgcttctttgcaggtcagtattttgattatcgtcaaatttctcagttgattttcaatatgttttcattcgaccaagtgcaactgactttagatagaaccaattggaaatggggaaaacgaaatattaatatcctgatgctcgcaatcgtttatcgtggaatagcgatacctatcctttggacattgcttaataaacgtggaaattcagatacgaaagagcgtattgctttgattcaacgctttatagccatttttggtaaagaccgtattgtgaatgtgttcgcagacagagagtttatcggtgagcagtggtttacatggttaattgaacaagacatcaacttctgcattcgtgttaaaaaaacttcattgtcaccaatcatttaggaaagaatcataaaattagtgatttatttcgccatcttaaagttggtcaaattgaatgtcgtaaacgacggattttggttggtcgggtgaaactatatataagtgcactacagttagaaaatggagagcttttactcgtcgtttctcctcagtttaatgccaatgctattcaggattatgcattacgctgggaaattgaaaccttattcagttgtctcaaaggacgcgggtttaatcttgaaaatacgcgcttgacagaccctagacgagtgaaaaaattgattgcggtgttagctataagcttctgttggtgttacttaacgggtgaatggcaacatgatcaaaaaaaagcgataaaaataaagaagcatggacgactctcaatgagtttatttcgctatggtttagactatgttcaaatggcgattcagcgtttaattggttttgggaaaaaagaagagtttaaggaaattttggcaattttaagaaggcagaaccctgataggataagggttctgtgaaatttgtcgtgtacagagctaatttttgatacttcattagaagaaactccagtcactgatgaagactatgatgacgaagaataattactcgtaattattgaataaaaagcaaacttcggtttgctttttttatatgcaacaatgagttaatacacaaagcttacaaactattctgtttttatgatttaagttgaatacatattctccgttaggctaacttaaaatttcttaaggatttcgcagtatgcaatttaaaccacttggtcacactggcattaaccttcctgaaatttgcttaggtaccatgacatttggtgagcaaaatactcaacaagaagctttcgaacaactcaattacgctttagaacacggtttatatttttgggatacggcagagatgtattccgtgcctcctaagccagaaacatatggagcaaccgaaaccatcttaggcaattggtttgcacagcatggtcagcgcgataaagtattccttgcttcaaaaattgcaggtcccggctttggtggaacacatattcgagacggccataccaagtttaatagtgaacatatttcacaagcgattgatggctctctcaaacgcttaaaaactgattatattgatctttatcaattacattggcctgaacgccataccaacttctttggaacgctcgcttatggtaatcagcaagcccaaaatgattatgacactactcccttagaagaaacattactcgctctccaaaaagagattaatcgaggccgcattcgttacatcggcttatctaatgaaacaccgtggggcaccatgaagtttcttcagcttgctgaaaatttaggtgtgagtaaatttgtgagtgtgcaaaatccgtatagtctgcttaatcgcacctatgaaatcggtatgtcagaaattgccaaatatgaaggtgtaggtttacttgcatactctcctcttgcttttggttatttaactggcaaatttagaaatggggctcgaccagccaatgcccgcgttacactcttccctcgctttagcagatacagcaatccgcaaagtgaatgggcaactgaacaatatgcacagcttgctgaaaagcatggtttaagcctgactcaattggctctggcttttattaagcagcaattttttgtgacgagtacaattattggtgcaaccaatttagatcagctcaaagaaaatatccaagcttttgaaatcgagctttcaccagagattttacaaggcattgagactattcatatacaacagcctaatcctgctccttaaaaaacaaaaacggatgctcaagcatccgtttttaacatcagttctataagtgttaaaacttacttacgaccattataaatagctaatgccgcaggtaaattcttacgcatgtcattaatacgttgagcgtttgatgggtgagtagacaagaaagatgatccactgccttcaagcttgttcattttttcccaaagcgtaatcgctgcattcgggttataacctgcacgcgccattagcattaaaccaccttggtcagcacggctttccaaactacgagaatatggcagacccacacctacttgcgtgcctaactgagccgcagccgcgcctagttgactcacattaccaccattaatctgacttaagccaatatttaacgctaaatcagttaaagcttgtgcgccaattttactttttgcatgctcttccaaggcgtgagtcatttcatggcccataactgctgcaatttcagcatcagtcaagttcagtttatttacaatacctgtgtagaacacgaccttgccaccaggtgcaacgtaagcgttaatcgtatctgacttcaatacagccaattgccaactaaatggctggcctgtctgattcatttgattcgcataaggttttaaacggttaaaaaccgcattaatacggttataggtacttgaacttgtatctaaagcacctttaccacgcgcttcctgcaccattttattgaaactttgtgcagattgagcatttaaggttgcagtatctgcacctgccatatcagccattgtggcacaaccagaaattgttactgcacctgctgcgcacaagcttagaacgaactttttattcattaacatgggtcacctaaatcgttaaaaaactgtttattcttttgcacttattataagaaataccactcacgctttaaatctctcatttcttcacgatcatagtatttatgtaacggtcaattagataaagtcatcaaataaatccagaatattaaacatattatgtttaaaccaagataaacgtgacttaaagtcttaactttctcttcaagattaggatttttcctcttccagagtaaataactgttttgtatgagaacaacagggatgaggacacaagcaatcaggacagaaagactcataaatgccgtcatgaagaagtccggattataattttgaccataaataatcagcattgctaatgtgggtgaaccacctatagcaaataaaaaagaataaaaaatggtttttgaaatagtgggttgcagcttcatcctgagcctatgattcctgaactatatatcatgttttaatctgaatcgaaccaaaccaaaactgcactttagtagggtataaaaaaagcccccttttaggaggctatttttatctttgcgaattacgcagagaatggatgacgtaaaatgattgtttctgcacggtctggaccagttgaaacgatatcaatcggacattcgattaattgttcaatacgttttacataagccaaagcatttgcaggtaattggtcaatgctcgttaaaccaacagttgactcgctccaacctggcatagtttcataaattggtttcaagcattcgaaagaaaccgcatcagaagaacctacacaacctgaatctgtattttcataacccacacagattttcacttcttctaaaccatctaaaacgtcaagtttagttaagcaaatacctgaaagtgagtttacatctacagaacggcgtaagatttcagcatcaaaccaaccacaacgacgttgacgaccagtagaagcaccgaactcatgacctacagtacccaaatgtttaccaattgggtcaccagaatcacttgcagcatcgtaaaccaattcagttgggaacggaccagcacctacacgtgttgtataagctttcgtaatacctaatacataatcaagatgtaaaggacccatacctgaaccagaacttacaccaccagcagttgtatttgagctggtaacatacggataagtaccgtggtcgatgtctagaagtgaaccttgagcgccttcaaacattacagccttaccttctttgcgatagtcatgtaatactttagttacgtcaatcactaatggagcaagaacttcacgccattggttgcaaagagctaatacgtcttcaaatttaaccgcttctacaccgtagaactgagtcaattggaagttatgtagctctagcatttcggctagtttttcttctaacgctgcaccaccacgaacaaggtcagcaacacgcactgcacggcgcgcaactttatcttcgtacgcagggccgataccacgacctgtagtaccgattttagcgttaccacgtttcttctcacgtgcctgatcaagagcaatgtggttaggcaaaataagtggacagtttggagaaatgcgtagacgctccttaaccggaacaccttcagcttccaaaattcccatttcttcaattaatgctgctggtgaaagcaccacgccattgccaattaagcacaatacgttttcacgtaaaatgcctgatggaatgaggtgtaatacagtctttttaccacctacgacaagagtatgacctgcgttatgtccgccttgataacgtactaccgcagccgcctgatctgtgagcaggtcgacgattttacctttaccttcgtcgccccattgggtaccaagtaccacaacatttttgcccataatagcctcattacatcatgctgttaaaattggaaaccattagtaaaaaacttactgctggcgtttaaatcttttcaatattccattgtccgttttgcaataccaattgatgtgttgcataaggaatagaacttaaatcatcattacctaacaattgaactacacgtaaaccctctgaacgcgcattcgcaattgctttaagtaaatcagcttctgtacctttaggtgccactacagtttcgatttcggcaaactggttcgcacctaaagcatataaatcacaactaaaaccggtagccggacgtgcacgaccgaagtgttccccaataccatcataacggccaccttgcgctaaaggtgcagcacgatttggtgcataaactgcatacatcaaaccagtgtggtagtggtaactgcgaagttcaaccacgtcaattccaacattaagtgctggccaacggtttttaatctgttcgagagtggttttaagtgcatttaatgcagcatcaaattcagcatcttttaaaatatctgcacttaaatgcgcttgtaaggcatctaaatcacttgcataacggccaagtgcatagaaatctgaacccatatttaaattttgggtaaattcagctaactcaggtaatgcttttctttgataaagatcagataactcatgctcttcatttttagaaagaccagcatattttactaagctacgaaataggcctacatgccctaagtctaaatgtgcgccttgcaaagtataggcattttcaatcagaccaagcatcacgtcgaccatttcgacatcagcttcaatactatcgtgcccatataactctgcgcctaattgtaaaggtgcgcgagtcgcattgaaattttgtggttttgtatgtaatacagtccctgcgtaacagtaacgtgcaacaccttcaacaggtcttacatgtgcatcaatacgtgcaacttgcggtgtcatatcagcacggataccgagtaaacggcctgaaagctggtcaatcaccttaaaagttactaaatccaggtcttgatttgattctgataatgaagacaacgattcgatgtattcgataaatggtgtatataccagttgataacctcgtactgcgaggaaatctatagcttcacggcgaagtttttcaatgacttgcgcctgttccggcaatacatctgctaccccgtcaggcagcaaccatgtctctgaaatggtcatatttcaagcctaaaatctgatcaacgtggaacgaccccacataaaaaaatcgggaacacacccgatttctcttagtgtagcatgatactttgtgccatgcacctgacaatttgcataaatctttcttaataaactctaaagtcaaaaagtagactctatgaattaaaaataatattcaaagacttattgtttttgacttccattatcaataaaagttcttagaccaaagaatggggcaataactgaactatcacccggtttccaattaaccaaatttaacttttgaaagaatcacacaaatccaataaacgatttgcatagccccactcattatcataccaagcaaatactttggcttgatgtccaacaaccatggtttgagttaaatcaacaataagtgaatagggcgaatgattaaaatcacttgaaactaatggttcatctgttacagccataatttctgcataatctgtttgagatgctttaatcagcaattcattaatatgatggaccgtaattggagattgcgcgataaacgttaaatcaattgccgctacattaatggtaggtacccgaattgagtaaccatcaatacggtcttccatttttggcatcacacgctttaaagcaccaagcgcactagaagtagtcgggataatgttttgtccagaagctctagcacgacgcaaatcacgatgcgcatgatcaagcacagactgatctgctgttaccgcatgaatttcggtcataagcgctgtttctatgccaaatgcatcatcaatgattttaaccagtggaactaaagcctgtgtcgtacatgacacactcgatataatctgatcagtcgctttcacatcagcatggttaacaccataaacaattgcagcatcaacatgatcaaaaggcgcagcgccaataatgacccttttagcccctgcttctaaatggcgggtagcatcagcatgggagcggaataaacctgtacactcaagtacaacatcaatttttaaacttgcccacggtaaaagttccggctgtttttgctgcaaaacttcaacctttaagagtctctggttagattgaatatttaaataaatcttttcattttcaatggtgatatcaactttgccattaaaacgaccatgcgttgagtcatatttgaataaatgtaccagtgtatgtacatctgctatatcgttaatcgccacgatttcaaaatgaaattgtttcgggctctcaaaccaggcacgtaaaacattacgtccaatccggccaaacccattaatggcgatacgttgcatgacctatccttatctacaaaacgagaagcgaaagaaggcatatagtaaaacacgtcatggctaattgaatatagatttttagccaaatcacagttttgtaagatattccctctaaaatcgttggttcggtggggtttttccgttacaatttagcgttttttaaaaataagccccgtatcacgtgcgagttttatgaacaaataaacttgtggtgatgcttttagccaaattcgaaaatatggagtgacttggttgtgagtactcgtttaatgacatctgctgaaattcgtgaagcatttttgcgctactttgaaacgcaagggcatacacgtgttgcatcgagttctcttgttcctgccaacgacccaactttattatttacaaatgctgggatgaaccagtttaaagactgttttttaggtcttgaaaaacgtgattatgtacgtgcaacaacatcacaaaaatgtgtacgtgcaggcggtaaacataacgatttagataatgttggttatacagctcgtcaccatacattctttgaaatgttgggtaacttctcatttggtgactatttcaaacgtgatgctctcaagttcgcatgggaatttttaactagcgaacaatggcttgctttaccgaaagataaactttatgtcacggtttaccatactgatgacgaagcttatgacatttggaataaagaaatcggcctagcaccagaacgtattatccgtattggtgataacaaaggcgaaaaatacgcatcagataacttctgggcaatgggtgatacaggtccttgcggtccatgttcagaaattttcttcgaccacggtgaacacatttggggtggtttacctggctcacctgaagaagacggtgaccgtttcattgaaatctggaacaacgttttcatgcagtttaaccgtactgctgatggcgtacttcacccactccctgctccatctgtagatacaggtatgggcttagagcgtatttctgccgtattgcaacatgttaattcaaactatgacattgacctgttccaacacttattaaaagctgctgcaaacatcattggtattgaagatgaaggtcagccttctttacgtgtagttgcagaccatgcccgctcttgctgcttcttaattgctgatggtgtaaacccaagtaatgaaggacgtggttatgtattacgtcgtattatccgccgtgctgtccgtcacggtaacaagcttggcgcaacaggtacgttcttctacaaaatgttgcaaccattaattgaagtaatgggacaggcttatcctgagttagaagctcgccgtgaagtcattgaagcaacattaattcgtgaagaagaacagtttgctaaaaccttagagcaaggtttaaaacttcttgaaggtgaacttgctcagttaaaagataaaactattccgggtgcgactgtatttaaactttacgatacttatggtttcccaacagatttaactgctgatattgcacgtgaacgtggctttattattgatgaagcaggttttgaagttgaaatggctgcacagcgtcaacgtgcgcgtgatgctggtaaatttgctgttgactataacaacattgtaaaagttgaaggcgaaactcagttcgacggttataccaacacaaccggtcaaggccagattgtagcgatctataaagatggcgtacaagttgatgaagtttctgaaggcgacgaagcacttatcgttttaaaccaaactcctttctatgctgaaagcggtggtcagattggtgatactggtatcttcaaaaacgaaacaggtatttttgaagttcaggatacgaaaaagtctggtggtgcctttgttcatcaaggtattgtgactgttggtaaccttaaaaccagtcaaaatgtagaagcgattgttaaagccgacattcgtgaagctactgcgcgtaaccactcagcaactcacttgttgcatgctgcccttcgtcaaattttaggttcgcatgtacaacaaaaaggctctttggttgcaagtgatatcttacgttttgactttgcaaatgaccaacctgtgtcatttgaacaactacaacaagttgaacgtctcgtaaatgctgaaatcattgcaaatactgctgtaacaactgaactactcgacattgaaactgcgaaagcaaaaggcgcaatgatgttgttcggtgaaaaatacggtgatgaagttcgtgtgctctctatgggctcagtcattgacgagaaaaacttctcaatcgaactttgtggcggaattcacgtaaaacgtacaggtgatattggtttattcaaaatcacttctgaaggtggtgtggctgccggcgtacgtcgtattgaagcagtgaccggtactaaagcattagaagtagtacaaaaagctgatcatgatatccagcacattaatagcttattaaaagcacagaaagaccaaacggttgagcgtgtacaagctaatgtagaattggtttctgcattacaaaagcagattgaacaactcaaccaaaaattggcaaacttccaagcggctgatttgattgaccaagttcaaactattgctggtcgtcaaacgcttattactactgttcagggtgttgatgctaaagcgcttcgcaacttacatgacagtgtaaaatcaaaattagagaacgcagtgattgtgttagcaggtgtagagggtgacaaagtcagcctgcttgcatcagtcgcgtcgcaatacactgcaaatctaaaagcaggtgacatcatcaaacatctagcgaccgagttaggtggtaaaggtggtggtaaacctgacttagcacaaggtggcgcgccacttaacgagaagtttggacaagttatggcagcattacctgcttggcttgaacaaaaataagacttcactttttgtgtaactgaccctgacaagcctctcagggtcatggcttatatggaacaactatggcattaatcgttcaaaaatatggcggtacttctatgggtacccccgagcgcattttaaatgttgctcgtcgtgtgaagcgttggcatgatcacggtcacaaagttgttgtggtcgtatctgcaatgagtggtgaaacaaaccgcttacttgccctcgctaaagccattaccgaaacacctgacccacgtgagttagaccaaatggtttcaaccggtgaacaggtgacgatttccatgttagctatggcacttaattcgattggtgtggaagctaaatcctataccggacgtcaagtcggtattaaaactgacagtgcatttactaaggcgcgtattgagtcgattgacacagatgtcatgaccaatgacctagatgcgggccgtgttattgtagttgcaggcttccaaggcttcgatgccaacggaaatactacaactctaggacgtggtggttcagatacttctggtgttgccattgcagctgccctaaaagcagatgaatgccaaatttatactgacgttgatggggtttatactacagaccctcgtgttgcccctaaagcgaagaaaatcgatcgcatttcttttgaagaaatgctagaaatggcatcattaggttctaaagttttacagattcgctcagtagaatttgccggaaaatatcaagttcctttacgcgtattatcaagttttgataatgatgacgacggcgcatttgacgacgaatttaaagaaaatgtaggtacactcattactactgaggcagaagacactatggaacagccaatcattgcaggtatcgcttttaaccgtgacgaagcaaaattaacaattttaggtgtacctgatgaaccgggtattgcttctaaaattttatcaccagtaagtgatgccaacattgaagtggatatgatagtccaaaatgttgaagaagatggcacaacagatttcacgtttactgtaaaccgtgttgatttagcaaaagctgaaaaaatcttaaatgaaactgccaaaaatattggtgcacgtgaagtttcaacacgcgatgacatcgttaaagtatctatcgtgggtgtaggtatgcgctcgcatgcgggtgtagcaagcaaaatgtttactgcccttgctgacgaaggtattaacatccttatgatttcaacatctgaaattaaggtttctgtcattattgatgaaaaataccttgagcttgcagttcgttgcttacataccgcttttggtttagatcgtgaacatggtgaaagcagcgcacgcgcttaattttaccgaacggtcaagaattcattaaaaaatgtttacttgtccgacaataatcaaagaaaacacagagccgctatagttttttttatagcggctctgttatattaaacggaaagttttttggcagtgattatcaaaatatgactttgttctcatatttctgttagaatctgactgaaaactgaggttgagctttttatttgggtaccaatattgcagttttaagcgtttagcaaggagataaacatgctgattctgacccgccgtgtcggggaaacattaatgattggggatcaagtcagtgttactgtgcttggcgtcaaaggaaaccaagttcgaattggtgtaaatgcaccaaaagaggtttctgttcatcgcgaagaaatttatcaacgtattcaacatgaacgtgcaatgcatgaacaccttcaacatcttgatcaagattatcaagtttcatatgaagatgataattatgcacagaaaaacttcaatcgttagtatgaagttgttctctccctaattaaagcgactttatagtcgctttaaattttttgggaatatataaatttatagtcctaatgcccgttttacaggtgcataactacgacggtgttgatcaatcacgccatgagcagcaatggcttcaaagtgtgctttggttggataccccttatgcttggcaaaaccaaataatggatattgttgatctaattctgccatttgacgatcacgcgtaactttagccaagatactcgccgcactaatttcggcatggcttgcatctccccctacaatcgcctcacaaggaataataattcctttggggatttgattgccgtctacaattaccttttgaggttgtgttttcagaccttccactgcacgttgcatagccaaaaaagttgcctgcaagatattcagctcatcaatttctgcatgtgtagcttctgctattgaccatgctaaagctttttcttgaatttcaataaacaacttttcacgtttcttttcagttaattttttagagtcgtttaatcctaaaattggattattcggatctaaaataacagctgcagcaacaaccgaacccactaatgggcctcgtcctgcctcatctacgcctgcaacaaacatgtatactccaatgaaaaagaggccgatttataagaatcggccttctttaatgcttaaaacatcaattatttttgtaaagcttctgccacacaagcatttacagttttagaaaccacttggtttacgattgtagcacgtgcattcacgtcaagcgcagcagcagctaattctactgcagtcacactatttggtgctttttcacttacacagccgcaaacattcgtttggatgctatcacgctgttcagcagtcatatattttgttgctgtcttccatgcagcaacattattaatttctgtaatacatttcgcattaacagcaacttttaatgcagctacgcctaactgttgagttgttgtttgtgcagaagcaccgccagtaccggtacctgtagtggttgcacatgcagttaaagctaaaacaactggtgctacagcgagcatcaattttttcatcattttttcctttgatcgaacgtaagcagcgcgtattttgcctaaacttgtgcttagaagaaacaaataaattgatgcatttatgcaaattaagtcccttaatctctagctcaacttaaccgtgttttttaaattgaagcgttctgtttatagcacgctctgttacgggaacaacatttctcaaatttaacagtttcccataaaatctagcgctagaatgacaaaaaaagggtcttttatgcctgcctcaacctctcaatactacacccgtactgcacagattctgcattggatcatggccatcatttttatcactgcttgggtgattggtttctatagtggaaattttctaagttatgacgttgatggcagctttaaaggcgatgtcattacactacataaaaacatcgccacaaccattatcttcctcgtggtcattcgtctgttttggcgttacacccatcctgccccacaattgcctgacacgatgtcaccaacaatgaaaactttagctcacaccggacatttattactgtatgtgattttagtcgctttaccagttactggctgtttatttagctggagtgctggtcaccctgctccggttttatatttatttgaaattccacgcctggtgcaagataaccctgagttattagccattgttaagccattacatatttatatttcatggtttgcaggtttacttattgttggacatgtacttgcagctttaaaacatcactttgtagataaagacaatgttttaaacagtatgaccaaacaacctaaataaattcaatgttaaaaaaaccgcctatcacaggcggtttttttatttagattttctggatttctgaaatccacttttgtttctcttcatctgaaatgaaagaggcttcaaaagagttaattgcgagttgcttcaactcatcattggttaaatctaatgcctgttgaatggcaaagaaattatcattcatataaccaccgaaatatgaaggatcatctgagttaacagtcacgtgtacgcctttttgtaaaagacggcggatattgtggtctttcatatccttaacaacacatagctttaagttacttaaaggacaaaccgttaatggcattttttcattaattaaacgagccattaattgttcgtcttcttcagaacgcacgccgtggtcaatacggtttactttgagcaggtccaaagcttcccatacatattcaggtgggccttcctcacctgcgtgagccacgattaagaagccttcttcacgcgctttagcaaaaacacgttcaaatttagctggtggatggcctacttcgcttgaatcaagtcctacagcgataatatcttgtttaaacggtaaagcttgctcaagcgtttcaaatgcagcttcttcgcttaaatgacgtaagaaacacatgatcagctgagaactgataccaaatttggcttttgcgtcagcacatgcacgtttaagcccattgatcaccgttgcaaaagcaataccacggtcagtatgagtttgcggatcgaagaacatttctgtatgaacgacacgatcttctgcacacttttcaaaatatgcccatgctaagtcgtagaaatcttgctcatgaacaagaacatttgcaccagcatagtaaatatctaaaaatgattgaagattatgaaagttataagcttgctttacttcttcaacagatttgtaaggaatctgaatctgattacgctgtgcaatggcaaacattaattcaggttcaaaggtcccttcaatatgcacatgcaactcggcttttggtaaggcctgaatcagctcgacttgattcatattaactccacatctaaagaaaaaagggtgtggtaagcacacccttctataatttccttcttatatccctatcactaaaatagttctagaaggaaattataaacaatcgtattaaccgccaaaggcgataaatttaaatacccaaagggcagcaataatccacaccatgtatggaacagtttttgccttacccgtaaataatttaactaatgcatagctgataaagcccattgcaataccatctgcaattgagtaagcaaatggcataaatacaatcgttaaaaaggctggtacagcttctgtaatatcatcccaatcgatgtgagtgatcccttggatcatcaatacaccaatgaacaataaagcgggtgctgttgcaaaacccggcacagattgagcaagaggtgccaagaataaacagcaaataaataagaaagcgacaactaccgcggttaaacctgtacgtccacctgctgctacacctgaagccgattcaatatatggtgtagttgatgaggtacctaatgcagcccccgcaacaattgcagtagagtcagcaaatagcgcttttttcaaacgtggcaatttaccgtcttgtaaaaggcccgcacggtgtgaaacgccaaccaaagtacccgtactgtcaaacaagtcaacaataaagaatacaaagatgacaccaaccatacttgcggtaaacaacccttcaaagtccatttgcatgaatgttggcgcaattgaaggaatttcaccaaccacacccttaaattcatttagacctaaagctgtggcaattgctgtaacgactaaaatactaataataatcgcaccgcgaactttaagctgatgcaaaattacaataagtaaaaagccaaataaagccaataacacagtaggttgtttaatatcgcccaaaccgaccaatgttgcttggttcgcgacaataattccggcattttttaacgcaatgagcgcaaggaataaaccaataccaccacctatcgcaaatttaagcgacatcgggattgcattgacaatcgcctcacgaattttaaagaaactaatcgcaaggaatactacacctgaaacaaaaacagctgctaaagctgtctgccatggcactcccatgcccatacaaaccgaataggtaaaataagcattaagccccataccgggtgccaaggcgattggataattagcaataatacccatcactaagcaaccgattgctgctgccaaacaggtcgcaacgaatacggcgccatgatccatgccggtttcagataaaatgagtggattgacaatgatgatgtagcacattgttaaaaatgtagttacaccagcaagaacttctgttcgaaacgtggttttattgtcgcttaacttaaataaacgctctaaccaccctgccgaagaattgggcgccgccataagtagcctctatgcaaaatctgagctgtggaatatgtacttctatgtaggtatctgagcaatcttgtttttctgttcagatctctagacaaaaatcttaaatagacgaagcaacaaatatgccactcatttgatttctgctgtcatacacagaaaatagccacagcccctcttgaaacacaaaaaagctgcataacccctatgcagcttttttactatacgttcaataagtttaacagattcaacagcaacatgatcaaaatttatgaaaagatatgatcaatggcacactttttaaagcaaatcacaatcacccctgtgcttagaaaaaaatttttttatcactgatatatttttgcaaattatatgaagctaaattgctatgactaacacggttaggattacgttcgatggtctgcaaatttttttcagcttcttggatgatcctcatgagctcttgatgtcttttattttgggtatctaaatatgcccaataccctaatacaaatacaatactcacgcataacactattaatactttattgatcattattattatctctatgtttttaatgttaatgatcttaacaaaaaaaaataaggttgtgaatactttcacatttatttacaataattattaaccacacaagttattgatataaaaatgttttccaatatacaatttaaaaaattgattaaaaagaaaacttttcacttaaaaattcatttttaaaaatagctatattattttaaatgaaaattatatagactgcttggcccatttttattttgaagtatatttaaatttatcgtttactttaacttcattatattatttattgaattttcatatatttctttcattatttaatagtaaaaagcccaccttaatcaataaggtgggcttttataaattaattaacctgcaacttcttcaactttaggttttacttttacaagatcagcttcatagatgacatcgtattcttctaaatttaaatgatgtaaacgctgtttaagctttttcaatgaccatggccatgctgcaaagttgcgaccatttgcatcaaggtaataactcttacaaccaccactattgaatactgtggtttgtaaatgcttttgtacaagctcattatgctttttaattatttctgattttacagaaagtttagcaatacctttcgctttcatttgcaataaaccatctacaatatattgcagttgggcttcagcaagaccaatgaatgagtcataaaccaagacatttggccctagcataagaaatgcgttcggtacattttcaatattggttcctaagtaagcttccggtgaggagtctttccagagttctgccagacattcccctttttcattatgtacccgtttaccaatgggtggatgggacacttcaaaacctgtaccccaaataatcacatctacttcgtggcgttcgccattagctgcaatcaccgtattgccttcgactttaaccaggccatgtggaataagcgtggtattggatgcctgtaacgctggatagtagttattggcaaataaaatacgtttacaaccaatatcaaaattaggtgttacgtttttacgtaaaaccggatctttaatttgtaactttaacaattgtttcgcagcaaaattgacaggctttaaagcttttgggttgcgtaaaccaaaattgatgacatttaaggcacctgctacagtctggcgccaagtggcctgtatttttgggtatttggcaataattgatttactcaactcccccaaatccgtatccggttttggcagtacccaaggggctgtacgttggaatacaaacagttcttttgctttaggctgaatttggggcacaaactggatggcagatgcaccagtaccaatcacggcaatacgttttccagtaaggtcatagtcatggttccatttcgccgaatggaacatttcaccagtaaaggtatctaaaccttcaatgcgtggaatctgcgcctcagtaattgggcctgtagcaaatagaactgttttagtaatatataaaccagagcttgtctctagtttccagacattttttacattgtcccattccgcttttaatagttcggtattgaattcaattaaggactcaatatcaaactcacgactaacatcttctaaatagcttaagatttccggctgacgtgcaaataaatggctccattttgcacttggagcaaacgagtaagagtacagagccgaaggtacatcacaaccacagcccggataggtattttcacgccaagtaccaccgacgcggcttgctttttcaataattttaaaattagttaggcctgcttcatttagcttaattgcagcagcaagaccagaaatacccgcaccgacaataaaagtgtcataaatatgtgcaacttcttgggttttacgggtgcgtgtatttgttctaggtttagtgaccataatttttctgcctatacaaaattttatttaaataactgatacgaaagcccaaggaactttgcatatagcgttggagatgtccttttcataagccagaataatttggcgtcgatctgtggcgtggtgtagagctgcccacgatctaatcgattcaatgttaaagttgcaactgcatcgctggtcgtcatggcatagttcatgagtgcatggtctgcaagcttggaataacgccccggaatacgaccatttttaatgatattggttggcaccaaagtcgggcaaagtacattgactttaatattgaatttgcgaagctcggctgaaagggtttctgataatgccaaaacacccgctttcgttacattgtagacactcatttctggtgctgcggtatacgacgcggcagaagccacattaatgattgcaccgtaacctagttttttgaactttggcacaaatgcatgacaaccatgaataacaccccacagatttacatgcatacaccatttccagtcttccaaactcatttcatcaaatttgccacctagacctacgccagcattattaatgatgagggttaccggatgatcaagcaactgctctgcctgatcagccaaagtctgtacttgttctgcttgcccaacatcgcactgtacagcaaatgctttttgtcccaactgttcaattaactttacggtttcttcagcagcttctaaattaatatctgcgcagactacgctgccaccacgttttgccagttcaactgcaaagcttcgtccaatcccactgcctgccccggttacgaccgcatatgcgtttcggctcggctggtctttcttaccaaataaaatcatagtaaatcctaaaaaattttagggagacggcagtaattgtcatattactgccatgaccaataggcttatgaaactgcacgaactggtggtgtaaattccttcacaaagtaaggcgcaattgcaccgccctcgttaagtaatttctttttgtagtactccagatattcggtcgtgtcatgatcatttggatggaagtctggacgtaagtaatcaaaaatctgaccaatggtgctaccaaatacgccatcttttggactaaaaattaagttgacgccacgacgtgcatctttccaaaattttctggtcaacagttcttttggcttacgcagtagaggtacaaataaagttgctgttggaataagccctaaaatggtaatgaaagccattaaaaagcccgttgcccgtaacggataattaccgtttaaaacctgatagacgtcataagcaatatctttatgctcagattcttcaagcatatgccacatccataaggcacgacttttggcatcgtcggtataatagaaattcttttcatgcttcatcatgtattcggcaagtaccgccgtaaaatgttcaatacccgccatgagtgaaagctttaatggctgcgggaattttaagaacacatatttaaagaagttctcacccaagaaacgataaaaatcgaccggatattccagctctttaattgcatcattgaactcattatgcaattttgaatggatggcttcttgaccaatcagcgatgtaacacgctgttttaaaatcggatcttgaataaattcacggtggtgacgagctgtttctatcaccagatcttcaccataggtcaaaaaaaccgaaagcgttgcaaaaaacaaagttgcaaactggttgttgacgtaaaactcgatatcaatttctttaccatcaaatccgatatttaaatggcgaattgggatagttcctttatttgagaaatctatcttttgatactgagctataactgatttaggagaaataatatttcggatagcttgagcgaccattttcgacaccctataaaatttgttaaatacaaggcagcgtcgaatcaaacagctaaagttgtctttggattatttcttgcaatctttaactgctctcaaacaaaaatttgctcgaatacctctgccttgtcatgttttatgaacttaagcgttgttaagttcaccaaatcaggttaaatagtgcgcttgctataacactctaacaaggacaaaaaaagccaatccattttgaaactttttgccaactcaaatatttttcgattattttaaattatttatataacctactattattcattattttttaaataaaatacatttgtcctaaaatgataaaaacatggcttaaaaagataacacacgaaatattctgcctatttctatacataccttagttctatatttgagcgttccaaaaatcacaccaagctttctgtttttagagctttattgcacaaatgaaaacgataaactgcattcagagaaaaaattggatgaggagaataaatcatgtttgatatgcgtttatctcatgagcgtggtgcagcacatcatggctggttacagtcaaaacacacgttttcatttgcaaattattgggacccgaaacaagttggcttttcagatttacttgtaattaatgacgatacggttgctccatcaaaaggctttggtactcaccctcaccgtaacatggaaattatttcttatgtgcttgaaggtgcattagaacataaagactcaatgggtacaggttcggttattgtgcctggtgatattcagttaatgagcgcaggccgtggggttgcacatagtgaatttaatcactctgctcaagaaaacgtgcacttcttgcaaatttgggtagttccaaatgaagtgaacacaacaccgggctatcaacaattgcatatttccgaggaagacaaacgcggcaaattgcacttgatgatttcaccaaaaggtggcgaaaaaactttatccatcaaacaagatattaatatttattcaggtctttttaatggtgaagaaacagcagagttttcaattccagaaggtcgttatgtttacctacatgtggcaaaaggccgtattgatgtaaacggtaaaacctttaataccggtgatgctgcgcgtattcgcgatggaggcaagttatcatttaccaatggtgacaatgctgaaattctgatttttgatatgcgtccggaagaaattccaaccatgccataaatagtaaaaacacctgcgtagaagtatacgcaggtgttttttatcacatttgaaaaactaaaaattatgattgatcttctgagcgtgccatttcagtattgatataactcataatcatagtggttagcccctgcaccatttcatcaaaactaataaatgggttgggtaaaataagatgtcttgcaacattaaaaataccgctattaatacaaatataggtaattacaggtaagttattaatttttaaatatttaggattatgcatcatatacttcatgatgacttccattaaagcctgttcaatttttggaatatatttatcgtattgcaactcacctgcataacgtaaaacggttaagtaacggtcattatttttctttaataaatcactgaacgtataaaaaatcatttcaataacaggttctaactccaactctaaaattgtaggagttagctctttaatcatgtcgagaatttcactcacaaagtagtgattcatcgcatcataaatttcttctttgtttttaaaatactcatagagtgaccccacactcacccctgcaatttctgcaatatgacgtgtagtggtaccacttggtccatgcaatgctacagcaataaaacctgcttcaataatggtatcgacagtgactttggctcgtgcctgacggggttttcgcgtagacatattttcttataaataatccgaacataagctcagattagcatgtaatttagccctaccctaataaaaaaacaaaatccgaatagttgtcaaatttcatgaaatatttcttttaaaactacaatgaaatacagttataagttcttttatgtttgagtatttctttttaattacattaaaatatttaaataaaaatcaatatattaataaattttaaaactaattttttattttataaaaacatgaaactttaggtttagaaacttgaaaagttacccgaattgaatccgaacataaactcagattaacatgaaaaaatctaaaaagaggttaagctttttactgaactttcctctttttcccgttattcagtcaaataatcacacaaataacggagcaacatcaccgtagtcagtaagcagagaaaactgctttttgaaaatggaatttacagtgccctgtttcaaatcaaagcttttggttttcgacgtagccgcactatcactgattgatctgaaggtgtcaccatgatctcgaccacagttaaaaaatcactaaacaaaattaaattttaccgtgaaatcgagttaccggattttgctagtaaaaaatccatcccaatccgtcatttaaatatcggatttgaaggtaaagagattgatgttgaattctatatgaacaatcaatttgccacgatgttttttgctacgctttcagtatttctgacttatggtgaagatctggtgattgaaacagctcgtcatcaccgtgaatttattcaagatccagttttaaaacagcgtgttacttcattgattggacaagaggcgattcattctaagttacacaatgaatataacgatgcacttaaagatgttgaataccctgttgatttataccgtttcttgggcgaaaacttctttaaatatgtgtttttgaaatttccgcaaccgcttaaattatcgatgatggctggtattgagcattttactgcggtacttgccgaatacatgatgaagcacgaaaagaatttctactattcagatgatgccaaaagccgtgctttatggatgtggcatatgcttgaagaatccgagcataaagatattgcctatgatgtatatcaattactcaatggtagctacccactacgagcttctggcttcttcttagcattcttcactattttaggtctaatccctgcgactaccttgtttattccggttttaagaaaaccgcaggaaatgttgactagaaaattctggaaagacgcgcgccgtggtgtaggacttatttttggtccaaaagatggtgtattcggtagcaccattggccagattttcgattatttacgtcctgacttccacccaaatgatcatgacaccactgaatatctagagtactacaaagacaaattactcaaagaaggcggcgcgattgcaccttactttgtgaaggaatttaccccacctgtacgcttgtcttaactggcttgcaaccagtcattacttaatggctggtgttccttaaatctatttcgggatgaatcatgattttatttggcaaaaagaaggttaaaccaagccaaaaagcttatgccgtcgtgacgggtgcaggcagtggaattggacgaagttttgcaattgaactggcgaaacgtggtggtagcgtagtctgcgcagatattaatttagaagctgcagaagaaactgtaacgttgcttgaacaacagggtgcaaaagcttttgctatgcgctgtgatgtgggtgacgctgaacaagttaaccacctagctgaaactgctgaaatcttatttgggcatcctgtgactcttgtcattaataatgctggagtaggtttaggcggtaaatttgacgaactcagcctagaagactggaactgggtcatgaatattaacctttggggagttattcatggctgtcatgcatttgttcccaagtttaaaaagttaggttacggcgcgattattaatgtggcatctgcggcatcttacacggctgccccagaaatgactgcttataacgtgactaaagcgggtgtgcgtgcgctttcagaaacgctttcggctgagcttcgtaaattcaacattaaagtcaatgtgctctgcccgaccttggtgcctaccaatatcattaaaaatggtcgtattccgggccgttattcaaaacttgcagaccatgcgctcatgaactacgcactcaccacaagtgatgatgtagccaaactcacacttaaccgccttgatcaggatgagctttataccatccctcaaatcgatgcgaagttgttctggctgatgaaacgtgcatcaccaagtttgtataccaagttccttggtacctcttacaaattatttaaataagaaattttataggtagtacccatatgactgctcaaatgaaaacaaatgcatcagcaaaaaaagctgtcaattcacctagccatatttacgatacctttattgtcggtgccggaatttccggtatcgccgcagcgattcgtctcgaccaagttggctataccaactataaaattattgaaaaagcaggacgtgtgggtggcacttggcgtgaaaacacctatccgggctgtggctgtgatgtaccgtcagctttgtattcttattcgtttgcgcctagtgcaaaatggagtcacttatttgcgcgtcaaccggaaatcttaagctatttagaagatgtaagtaacgagtttaatattacgtctaaaattgagtttaacaacgaactactcaatgctgcttgggatgaatcacaccatttgtgggtacttgatacaactactggtcaatatctatctcgaactgttatttttgctacaggcccaattaccgaagcccagattccacgtcttgaaggtttagatacctttacaggtgaaatgttccattcagcgaaatggaatcatgattatgaattaactggaaaacgcattgctgtaattggtacaggtgcatctgccatccagtttgtgccccaaattcaacctaaagccaaagaattgtttgtattccaacgtacagctccttgggtactgccaaaaccggatacagacttaggtgagtttagtaaatcaattattgcaaaatatccagcgattcaggcaagttggcgggcactgttgcaaatagtcggtggtgataaacttatcatccccttttgctgatggagctgcacatgaacccattcaaaggccggcattttcagcgtgacatcattctgtgggccgtacgctggtactgcaaatacggcatcagttaccgtgagctgcaggagatgctggctgaacgcggagtgaatgtcgatcactccacgatttaccgctgggttcagcgttatgcgcctgaaatggaaaaacggctgcgctggtactggcgtaacccttccgatctttgcccgtggcacatggatgaaacctacgtgaaggtcaatggccgctgggcgtatctgtaccgggccgtcgacagccggggccgcactgtcgatttttatctctcctcccgtcgtaacagcaaagctgcataccggtttctgggtaaaatcctcaacaacgtgaagaagtggcagatcccgcgattcatcaacacggataaagcgcccgcctatggtcgcgcgcttgctctgctcaaacgcgaaggccggtgcccgtctgacgttgaacaccgacagattaagtaccggaacaacgtgattgaatgcgatcatggcaaactgaaacggataatcggcgccacgctgggatttaaatccatgaagacggcttacgccaccatcaaaggtattgaggtgatgcgtgcactacgcaaaggccaggcctcagcattttattatggtgatcccctgggcgaaatgcgcctggtaagcagagtttttgaaatgtaaggcctttgaataagacaaaaggctgcctcatcgctaactttgcaacagtgccccttggcgttgatggccttgcctgacgcctggaactgctgctgatgcttattcttggcagcgttaaacagcttacccaggatgcggtcgtgcaggtcgatgatttcgtcggtgacggtggccatgccctcggtggccagcgccacgagagtggcgtagcgccgttgcggctcgaatttggccaggtcggcgggtgtcatctggccgccctcgcgggcaatcttgagcaggcggttctggtgaaccagccgctcgatgccggtaggcagatcgagtgcctgccatgccttgaggcgttcgatgtgttccagcatatgccgcgaatttggcttggccggagactggcgcaaccaagccaaccaggtcgtcttgccgttgtcccggcgcttgagcagatcgtcgaggcggcggcgatgcgcgtccgccagtggttcggccaaggcgtcgtagatgcgccggttagcacgggtgatcgcctcggcactcgcccgctcgacggcgttgagggcgggcagaatgaccgactgccgccgcaggtgcccgatcaaggcgctggccagcacgatgcctttgtcggtttgcatcgccagctcggtcagcatctggacggcctgccggtaatggctcatggtgaagggccggaaaccgaacacggtttgcagctcgctcaggtgctcgcgccgggtctgctcccgctggccgtactcgttccagctttcgacgccgaccttgagctggtcggcgaccagcttcaacaagggcgggaacggtagttcatcgacgcccaggatgacgccgggaaagcgcaggtaacagagctgcaccgcgaagcccagccgattggctggcccgcgccgctgtcggatgatcgagaggtcggtatcgttgaatgtgtaatgtcggatcaggtcgtccttggagtccggcaacgccagcaggctttcccgctcggcggcggacaggatggaacgacgtggcatatttactgatccgttctcaagtattgatacagggtttcgcgactgattccgaattcacgagcaagcttggtcttttgctcgccagcctcgacacgttggcgcagttcggcaatacgctcagacgacagggatttcttcctgccacggtaagccccgcgttgcttggcgagcgcaataccctcgcgctgacgctcgcggatcagggcgcgctcgaactcggcgaacgcgcccatcaccgagagcatcaggttcgccatcggagagtcttcgccagtaaaactgaggtgttccttgacgaattcgatatgcacgccgcgttgtgtcagcgtttgcacgatccggcgcaaatcatcgagattgcgcgccaggcgatccatgctatgcaccaccacggtgtcgccggtgcgggcgaagcttatcagcgcttccagttgcggacgcttgacatccttgccggatgccttgtcgctaaaagcgcgatcaaccttgacgccttccagttgccgttccgggttctggtcgaaggtgctgaccctgatatacccaatgcgctgtccagtcatggaattccctgcaaaatgtcagggaagactctatgaccttcaacgagatatgtcaataaattcaaaattcaatcctatcctgacgcaatttacacatggcatctgacatcaggttagggtatgcctcaacctgacggcggcgaatcacaagcgtccggtttgacgctggtttcggtcgcagtgctggcccgcgcctggaagcgctgatagcactccagcccgcagaaatgctccacgtactcggccccttccggcgtgaaggcggcatcgagcgggatttccttgcagcacacgcagcaactggtgctcggttcattggcgttcatggtggtgttcctccattggttgacgaagccgacgaaggccgccgccggcatcggcctggcgaacaggaaaccctgcaccgtgtcgcaacccgcctgccgcaaccacgcaaggcagtcgggtgtttccacaccctcggctaccacctccattgtcgttttcagaagacggctgcactgaacgtcagaagccgactgcactatagcagcggaggggttggatccatcaggcaacgacgggctgctgccggccatcagcggacgcagggaggactttccgcaaccggccgttcgatgcggcaccgatggccttcgcgcaggggtagtgaatccgccaggattgacttgcgctgccctacctctcactagtgaggggcggcagcgcatcaagcggtgagcgcactccggcaccgccaactttcagcacatgcgtgtaaatcatcgtcgtagagacgtcggaatggccgagcagatcctgcacggttcgaatgtcgtaaccgctgcggagcaaggccgtcgcgaacgagtggcggagggtgtgcggtgtggcgggcttcgtgatgcctgcttgttctacggcacgtttgaaggcgcgctgaaaggtctggtctacatgtgatggcgacgcacgacaccgctccgtggatcggtcgaatgcgtgtgctgcgcaaaaacccagaaccacggccaggaatgcccggcgcgcggatacttccgctcaagggcgtcgggaagcgcaacgccgctgcggccctcggcctggtccttcagccaccatgcccgtgcacgcgacagctgctcgcgcaggctgggtgccaagctctcgggtaacatcaaggcccgatccttggagcccttgccctcccgcacgatgatcgtgccgtgatcgaaatccagatccttgacccgcagttgcaaaccctcactgatccgcatgcccgttccatacagaagctgggcgaacaaacgatgctcgccttccagaaaaccgaggatgcgaaccacttcatccggggtcagcaccaccggcaagcgccgcgacggccgaggtcttccgatctcctgaagccagggcagatccgtgcacagcaccttgccgtagaagaacagcaaggccgccaatgcctgacgatgcgtggagaccgaaaccttgcgctcgttcgccagccaggacagaaatgcctcgacttcgctgctgcccaaggttgccgggtgacgcacaccgtggaaacggatgaaggcacgaacccagttgacataagcctgttcggttcgtaaactgtaatgcaagtagcgtatgcgctcacgcaactggtccagaaccttgaccgaacgcagcggtggtaacggcgcagtggcggttttcatggcttgttatgactgtttttttgtacagtctatgcctcgggcatccaagcagcaagcgcgttacgccgtgggtcgatgtttgatgttatggagcagcaacgatgttacgcagcagcaacgatgttacgcagcagggcagtcgccctaaaacaaagttaggtggctcaagtatgggcatcattcgcacatgtaggctcggccctgaccaagtcaaatccatgagggctgctcttgatcttttcggtcgtgagttcggagacgtagccacctactcccaacatcagccggactccgattacctcgggaacttgctccgtagtaagacattcatcgcgcttgctgccttcgaccaagaagcggttgttggcgctctcgcggcttacgttctgccaaagtttgagcaggcgcgtagtgagatctatatctatgatctcgcagtctccggcgagcaccggaggcaaggcattgccaccgcgctcatcaatctcctcaagcatgaggccaacgcgcttggtgcttatgtgatctacgtgcaagcagattacggtgacgatcccgcagtggctctctatacaaagttgggcatacgggaagaagtgatgcactttgatatcgacccaagtaccgccacctaacaattcgttcaagccgagatcgcttcgcggccgcggagttgttcggaaaaattgtcacaacgccgcggccgcaaagcgctccggcttaactcaggcgttgggcaacaagaaaaccgatatgaacgtacgcacttgcactgaatctgacgtcgcctctatcgcagtcgtatttactgagtctattcatgtacttggagcgtctcactatgacgcttcgcaaaggaatgcgtgggcaccgcgtcccgcagatatagaggcttggtcagctcgcttatctggcctacagactcttctagcaattgagggagatgcggttatcgggttcatctcttacgagcttagcggccacatcgagtttctttacaccgcaccgggttccgagcgtcggggcgtcgcgtctgttctgtaccgtgaggttgagaaagccctcccaggtgtttcgctcttcacagaagccagtctggtcgccaagccctttttcctgcggcatggtttcagtgtagttgaggagcaaaatgtctcccgtggaggcgtcatgttccgtaggtatgcaatgcgcaaggcagttgtcgcccaacatggcgctcaagccgaccggccagccctgcgggctgtccgtcggcttagctagggcgttgggcaacaagaaaaccgatatgaacgtacgcacttgcactgaatctgacgtcgcctctatcgcagtcgtatttactgagtctattcatgtacttggagcgtctcactatgacgcttcgcaaaggaatgcgtgggcaccgcgtcccgcagatatagaggcttggtcagctcgcttatctggcctacagactcttctagcaattgagggagatgcggttatcgggttcatctcttacgagcttagcggccacatcgagtttctttacaccgcaccgggttccgagcgtcggggcgtcgcgtctgttctgtaccgtgaggttgagaaagccctcccaggtgtttcgctcttcacagaagccagtctggtcgccaagccctttttcctgcggcatggtttcagtgtagttgaggagcaaaatgtctcccgtggaggcgtcatgttccgtaggtatgcaatgcgcaaggcagttgtcgcccaacatggcgctcaagccgaccggccagccctgcgggctgtccgtcggcttagctagggcgttgggcaacaagaaaaccgatatgaacgtacgcacttgcactgaatctgacgtcgcctctatcgcagtcgtatttactgagtctattcatgtacttggagcgtctcactatgacgcttcgcaaaggaatgcgtgggcaccgcgtcccgcagatatagaggcttggtcagctcgcttatctggcctacagactcttctagcaattgagggagatgcggttatcgggttcatctcttacgagcttagcggccacatcgagtttctttacaccgcaccgggttccgagcgtcggggcgtcgcgtctgttctgtaccgtgaggttgagaaagccctcccaggtgtttcgctcttcacagaagccagtctggtcgccaagccctttttcctgcggcatggtttcagtgtagttgaggagcaaaatgtctcccgtggaggcgtcatgttccgtaggtatgcaatgcgcaaggcagttgtcgcccaacatggcgctcaagccgaccggccagccctgcgggctgtccgtcggcttagctagggcgttagagcaaaaatgaactgcgcacgctgtggccgccagaatttcgtagatgcacatcgttgcgctcactgcggccaccacttctttgacggtagtgacgtggtgaatcttctagacaaggctcagaagcgcacttggttaaggccgcgaaacatcgccatattccttgcggcctgggcgctactggtggtggagatcgtcacctacgcgggtaaagcgccaagttctcctcagggctgggcggcgctcatactgctcgggcctattgtgtacgtcgtactagcaacctgtgcagatacaatttttcgaaagccatgaatacagtaaatcgctcatgctctaaccaatgcttccagccgacgctacggccttacggcctccgcgcgtctgaagctgggcgttaaacatcatgagggaagcggtgatcgccgaagtatcgactcaactatcagaggtagttggcgtcatcgagcgccatctcgaaccgacgttgctggccgtacatttgtacggctccgcagtggatggcggcctgaagccacacagtgatattgatttgctggttacggtgaccgtaaggcttgatgaaacaacgcggcgagctttgatcaacgaccttttggaaacttcggcttcccctggagagagcgagattctccgcgctgtagaagtcaccattgttgtgcacgacgacatcattccgtggcgttatccagctaagcgcgaactgcaatttggagaatggcagcgcaatgacattcttgcaggtatcttcgagccagccacgatcgacattgatctggctatcttgctgacaaaagcaagagaacatagcgttgccttggtaggtccagcggcggaggaactctttgatccggttcctgaacaggatctatttgaggcgctaaatgaaaccttaacgctatggaactcgccgcccgactgggctggcgatgagcgaaatgtagtgcttacgttgtcccgcatttggtacagcgcagtaaccggcaaaatcgcgccgaaggatgtcgctgccgactgggcaatggagcgcctgccggcccagtatcagcccgtcatacttgaagctagacaggcttatcttggacaagaagaagatcgcttggcctcgcgcgcagatcagttggaagaatttgtccactacgtgaaaggcgagatcaccaaggtagtcggcaaataatgtctaacaattcgttcaagccgacgccgcttcgcggcgcggcttaactcaagcgttagatgcactaagcacataattgctcacagccaaactatcaggtcaagtctgcttttattatttttaagcgtgcataataagccctacacaaattgggagatatatcatgaaaggctggctttttcttgttatcgcaatagttggcgaagtaatcgcaacatccgcattaaaatctagcgagggctttactaagcttgccccttccgccgttgtcataatcggttatggcatcgcattttattttctttctctggttctgaaatccatccctgtcggtgttgcttatgcagtctggtcgggactcggcgtcgtcataattacagccattgcctggttgcttcatgggcaaaagcttgatgcgtggggctttgtaggtatggggctcataattgctgcctttttgctcgcccgatccccatcgtggaagtcgctgcggaggccgacgccatggtgacggtgttcggcattctgaatctcaccgaggactccttcttcgatgagagccggcggctagaccccgccggcgctgtcaccgcggcgatcgaaatgctgcgagtcggatcagacgtcgtggatgtcggaccggccgccagccatccggacgcgaggcctgtatcgccggccgatgagatcagacgtattgcgccgctcttagacgccctgtccgatcagatgcaccgtgtttcaatcgacagcttccaaccggaaacccagcgctatgcgctcaagcgcggcgtgggctacctgaacgatatccaaggatttcctgaccctgcgctctatcccgatattgctgaggcggactgcaggctggtggttatgcactcagcgcagcgggatggcatcgccacccgcaccggtcaccttcgacccgaagacgcgctcgacgagattgtgcggttcttcgaggcgcgggtttccgccttgcgacggagcggggtcgctgccgaccggctcatcctcgatccggggatgggatttttcttgagccccgcaccggaaacatcgctgcacgtgctgtcgaaccttcaaaagctgaagtcggcgttggggcttccgctattggtctcggtgtcgcggaaatccttcttgggcgccaccgttggccttcctgtaaaggatctgggtccagcgagccttgcggcggaacttcacgcgatcggcaatggcgctgactacgtccgcacccacgcgcctggagatctgcgaagcgcaatcaccttctcggaaaccctcgcgaaatttcgcagtcgcgacgccagagaccgagggttagatcatgcctagcattcaccttccggccgcccgctagcggaccctggtcaggttccgcgaaggtgggcgcagacatgctgggctcgtcaggatcaaactgcactatgaggcggcggttcataccgcgccaggggagcgaatggacagcgaggagcctccgaacgttcgggtcgcctgctcgggtgatatcgacgaggttgtgcggctgatgcacgacgctgcggcgtggatgtccgccaagggaacgcccgcctgggacgtcgcgcggatcgaccggacattcgcggagaccttcgtcctgagatccgagctcctagtcgcgagttgcagcgacggcatcgtcggctgttgcaccttgtcggccgaggatcccgagttctggcccgacgccctcaagggggaggccgcatatctgcacaagctcgcggtgcgacggacacatgcgggccggggtgtcagctccgcgctgatcgaggcttgccgccatgccgcgcgaacgcaggggtgcgccaagctgcggctcgactgccacccgaacctgcgtggcctatacgagcggctcggattcacccacgtcgacactttcaatcccggctgggatccaaccttcatcgcagaacgcctagaactcgaaatctaacgtccgttcgggcatcgaggtccatgtcggggtgggacgggcccgtggcttcaagatcacttgcagtccgaccgcgatgtcttggttgcgcgagaggttgtcgatatcctccacttccatcatcaaccctggataatgccgccgccgtcatcgccgccgacgcccgtgccgggcttttcgggcctgtcaggcttgctcggccttcagcctgcctgggcgagatctccggcggacggattaacggcggagcttcgccgcctttcgtgcgtgtgaaggccgaagatagttctctcaaaaacatccgtttatgagagataccaaatgtcattttcagaagacgactgcaccagttgattgggcgtaatggctgttgtgcagccagctcctgacagttcaatatcagaagtgatctgcaccaatctcgactatgctcaatactcgtgtgggctctgttgcaaaaatcgtgaagcttgagcatgcttggcggagattggacggacggaacgatgacggatttcaagtggcgccatttccagggtgatgtgatcctgtgggcggtgcgctggtattgtcgctatccgatcagcggcactgttgcaaagttagcgatgaggcagccttttgtcttattcaaaggccttacatttcaaaaactctgcttaccaggcgcatttcgcccaggggatcaccataataaaatgctgaggcctggcctttgcgtagtgcacgcatcacctcaatacctttgatggtggcgtaagccgtcttcatggatttaaatcccagcgtggcgccgattatccgtttcagtttgccatgatcgcattcaatcacgttgttccggtacttaatctgtcggtgttcaacgtcagacgggcaccggccttcgcgtttgagcagagcaagcgcgcgaccataggcgggcgctttatccgtgttgatgaatcgcgggatctgccacttcttcacgttgttgaggattttacccagaaaccggtatgcagctttgctgttacgacgggaggagagataaaaatcgacagtgcggccccggctgtcgacggcccggtacagatacgcccagcggccattgaccttcacgtaggtttcatccatgtgccacgggcaaagatcggaagggttacgccagtaccagcgcagccgtttttccatttcaggcgcataacgctgaacccagcggtaaatcgtggagtgatcgacattcactccgcgttcagccagcatctcctgcagctcacggtaactgatgccgtatttgcagtaccagcgtacggcccacagaatgatgtcacgctgaaaatgccggccttgaatggttggttcatgtgcagctccatcagcaaaaggggatgataagtttatcaccaccgactatttgcaacagtgccagtccgagaacatgctttccatggtctctgagctcgcctttgggaccgacatatcggtagagagtgacgcgctcgatgccgagttccttgcagagatcggaaactgaagtatcgcgctgggccatggcggcttgcgcgagacgcacctgagctttggtgagcgcgaattttcgtccgcccttgcgaccgcgcgctctcgcggaggcgagacccgccatggtgcgctctcggatcagatcccgctcgaactcggccaaggtggcgaagattccgaacaccatgcgaccggacgcagtcgtggtgtcgatctgagcgccctttccagtcagaacccgcaggccgatcttgcggtctgacagctccttcaccgtgttgaccagatgggcaagcgatcgtccgaggcgatcgagcttccagaccaccagcacatcgccgtcacgcaatgacttgaggcaggcagtcaagccagggcgatcatcacgaccgccggaagcaagatcatcatagatattgtcccgttcgacacctgcggcgcgcaaggcgtcgtgctgcaggtcgagagactgcgagccatcggctttggagacgcgggcatatccgatcagcatgtatcacaaacgttggtttgaggcggcgcttcggccacgattgcattgacctctggaaatgtatctcaaccagcttcggggttcaaggtccaatgatgtaaaaaaccacgctaagaggttaattcattgtttgtattgaaatttaatggtcttaactcgcccttcagaatatcttccggtaacgaaaacgtataatgccccagcatatttatatggccatgtatcagcggcgataatcttgccagatgctcctcttcaggtgtttcccccgatttgcgaagatgtgacaacgcctcctgcatgtaaagtgtgttccacagcacaaccgcattggtcaccagacccagagcaccgagttgatcttcctgcccttcacggtagcgttttctaatttcaccacgttgtccgtagcaaatggctcgagccactgcatggcgtccttctccccggttgagctgagtgaggatccgacgccggtaatcctcatcatcgatatagttgagaagatacaacgtcttgttgacccggcccacttccataatcgcctgagccagaccagatggtcggctacttctcaacagtgaacgaataagctctgatgcatggatggtcccaagcttcagtgagcccgccattcgcatcatttcatcccattgggattctatttttgacagttcaacacatccccgggccagctcattcagggcaccataatgtgccgttttatctgcccgccagaatatcgccccgcctgcatcggccagacgaggggaaaactggtagcccagtaaccagaacaggccaaaaatgatatcgctggatcctgccgtgtccgtcataatttctaccggattcagcccggtctgctgctccagaagcccttccagtacaaagatggaatcacgaagcgtaccgggaacgacaatgccatggaaaccggagtactgatcggagacgaagttgtaccaggtgataccgcgtcctgaaccaaagtatttacgatttggtccggaattaaccgttttaaccggtgtgacaaaacgcataccatctgcggaggcaacctcaccacctccccagtaccccgcgagcggcagcgtggactgaaaatcaaccagccgtgcattagcgctgaccagcgtttctgccctgagataattttgtttaacccagctcagacgatggcgagtaagcgcgggaatattatgctttatcaggggttcatgccctatattgcaggcttctgccagcagtgttgcgcacagactgacctggagatcctgcgcccgagcacctgattcactgacgtggctgaattcgcgggtaaaaccggttcgggcatctatttcaagcaacagctcagtcagatcaaccggagggatcagttctcttacccgacgattcaattgtatcagtgccggtggctcatccagtttatccagactgctaatcgtcagtgagggatgcttaccttcattgcttatgctgaccgctgcgttgcaggcaaaacgtgaagccactgatttccatgtgtcatcaagccgcgtagccagttgttctgctgctttagttccgtctgatggatgacccagcgcccgacataccgggatgcgttgtgcctgccattcagctccctgaagcaatttttgacgcgggtccccccaccggtcactgttctccagccagagatcacgacggcgcaaagaatcttgaaggcgctcgagaagacacagcgagtaacccgctcgtagaatcctaccatctctgtcgtagaccagacgtttccaggggccggaaatgatttgctctggtgcatcgtcgagaattcgcttttttgagccactcagttcggccagataatggattgctgacaacgtgtgctccccggccggggcggcctgaaagtgtaagtcacgcaacatcgcggacaggaagcgcttcacccgtccatattgttccaccatttcatcctgaaaatgagtatcttgcgggcgcgccagctcatttaccttgccgacggattcagccagtttgtcctttggtatgcggcgaaaaatagcctgccgcagagctgcttcatcggtgttctcatcaagtaataacgtgcatgcccgtgccagtaatagcgcggcacgatcaagatctttaagggtcctgagccgctttttctgcccgatattttttgcagaacgcgtgatatccagaataagcatatccagcacatccacggcctcgtcaagcgccgaaatttcctgtgctttcacaaacgcagtaagcacggccagtcgccgttcgtcaggcattcttgaaatgtatttcaccgaagccattccggcataacgggccaaattccgcagctggatggcaggcagaccggagaaattcagccgggaaaactccatgctacgcagtcgggtatatcgctccagggcgtctgtaaatgacggcccactgatagtgacaggaccttttcgcatctcttccagcaccgacatacgctgcccttcaggtatttcaagtaaaccgtccagttgtgttttctgccagctgtcaggcaacaaagccagccttcgccataatcgtcgacttgcccgttcgcgtacttcgccaatcagccttgtcagagtcgaggctgcgggtagcaggatcttattttgcagcaaccatgcggtagcaaaatcaaacagcagacctggacgctcattgctgagccaggcgcgagtatagagcaaacgcttcagtctgaatgaccaggggaaatcaccaaaatcatgataatcataatagagcttgataagcccctgatgctcccagcgggtattgtctctttcagcataccgggaaaggatctctggtcggctgatgttcaactgtgccgcaatgtaaaaacggatgaatgagggaatttgaaggagatcaggaagaaacgttcccagaaagcgcgccgtagtcagctgaagggcactgttgcaaagttagcgatgaggcagccttttgtcttattcaaaggccttacatttcaaaaactctgcttaccaggcgcatttcgcccaggggatcaccataataaaatgctgaggcctggcctttgcgtagtgcacgcatcacctcaatacctttgatggtggcgtaagccgtcttcatggatttaaatcccagcgtggcgccgattatccgtttcagtttgccatgatcgcattcaatcacgttgttccggtacttaatctgtcggtgttcaacgtcagacgggcaccggccttcgcgtttgagcagagcaagcgcgcgaccataggcgggcgctttatccgtgttgatgaatcgcgggatctgccacttcttcacgttgttgaggattttacccagaaaccggtatgcagctttgctgttacgacgggaggagagataaaaatcgacagtgcggccccggctgtcgacggcccggtacagatacgcccagcggccattgaccttcacgtaggtttcatccatgtgccacgggcaaagatcggaagggttacgccagtaccagcgcagccgtttttccatttcaggcgcataacgctgaacccagcggtaaatcgtggagtgatcgacattcactccgcgttcagccagcatctcctgcagctcacggtaactgatgccgtatttgcagtaccagcgtacggcccacagaatgatgtcacgctgaaaatgccggcctttgaatgggttcatgtgcagctccatcagcaaaaggggatgataagtttatcaccaccgactatttgcaacagtgcccccataaataatccagtaccaattgcaccaccgattgcgatcatttgaatatgacgatttgtcaatgagcgctgcaatttctcttcttcttgctcagtcatatgttgactgccaagaagatctccttccaggaattgttttccgttattcttactcatgtaatatttactccaatttatagcaaccgtcgtaaatgctttaataataaataaattatatgattattaatttagtccattaaatcatgttaaaaatattattaaatcatttaaaactttataaattcctttttaaaagctatcacctataacaataaaaattattcatcattcctttccttcattattatattagcctgcatttaaaaatataattttgaaaaattaataaaatatataaattaattacatattttattgaattatcttttatataataaaacaggctaattaatcccagctcagcgagcaagatcgtatttatccatatacccctcttgcgctagcgataatatagtattccttcttaaatttggtgaaatgtatagtatttctgcttaattaacagccattcgcaaatgttctgtttctttaattttgttcactatctgtgggttcgagtcctgtttaacatggacgcttaacacacggactaaaccaccattttcaacttttaattgttttgcttgtgcttttgttatttgcaatgactcctgataaggtgtgccaaatacaagaattgctcgataattttcatagttatcgttggccacaatatagggttcatcacctaaactaagaggaatagactctacaacttgtacagttaaaatctggctttctttaattgctcttaaattttcaatatctgcttgcagcgttgcaccaccatcaaaaatatctatatagcctttgtagcgtagtccttcttcaagcaagagattgtaggctggtcgagtattgggatgaacaataccaatcgcggctttagcatcatcaggcagcatatcgacatagaggggatgtctcggcatcaactcagcaataaaagccttttgccccactccactcaaataatcggctttggtaaattcaatattaaaaaacttatgccctaccgcattccaaaatggtgattgcccatttgcatcagaatagccgcgcatttcagcaacaatcgtttcttcgaaatattggcgaaaggcagagagaaacaagaaacggactttagataaaaatttgccatttttatttaagcgatagtcaggatctaaaaataaagtacaaagctcactacagttagtatgatcattactcaaatacaaagtaggtaaagcgttataaacacttaagggttctgaagcatgaacttgggttcctacatggaaattgtaccaaggctcttttaaaccaagtgcgacttcaattccgcaaaccccgacaactttgttgagttcagtatcttctaaaacaaataagtaaacctgatctgcttttgggagttcgcctgcgactgtcttacacgcccgttcaatacgtgcagccaacttttccatatttggctgcaaagatgtcaaaccaaaacccgctttttgagccaacaggtaaaggtcattaacatccctaggttcgatgtagcgaataatcatcatgctgcttgttcatccttttgaagttccacaaagcgagcaagcgcacgttcaaagcgttttaaaccttcatcaatatcagcaaatggaacgattaaagaaggtgtaaaacggactacatttggaccagcaatcagactcaataatccttcttcacccgcaaggttattaatatcttttgctttaccagcaaactcgtcttttaaaacacatccgagcaataaaccactgccacgaattgctttaaagacttcatatttttcatttaattgatttaaagcttttttatagtagtcgtgacgctctttaactccattcagcacttcaggcgtattaataaactcaaagactgcccctgcaaccgcacttgctaacgggttaccaccataagtcgtaccatgtgtgcctacagaaaaatgcggtgcgaacttatcagttgttaacattgcaccgaccgggaaaccaccgcccaatgcttttgcagtcgtaagtacatctggaatcacaccgtagttcatgtaggcataaagtgcacctgtacggcccacacccgtttgtacttcatcaaaaataagtaaggcaccgaactgatcacacagttcacgtaaaccttttaaaaattcgatatcagccggaataactccgccctcaccttgtacaggctctacaattactgcacaagtttgttcatttatgactgctttagctgcttctaaatcattataagcaacatggctaataccgtttggaagtggtgcaaagtcttgtgaatattttggctggccgcctgctgaaacggtaaataaggtacggccgtggaaagcattgttaaatgccacaatgccacttttacctgcaacaccgctgtcgagtccaactttacgcgcaagttttaaagctgcctcattcgcttctgcacctgagttacagaagaatactttatcggcaaatgtattttcagtgagttgtttagcaaggcgtagtactggttcattggtatagccattaccgacgtgccaaagtttttttgcttgttctgttaacgcattgactgccactggatgcgcatgacctaatgcatttactgcaatcccgcctgcaaaatcgatatattctttattttcttgatcccagatacgtgaaccttcaccacgtaccggaatgaaatttgccggtgcaaatactggaaccatccactcgttaaagtcaccacgagaaactgcaaaattattcatcttatctagtccattaaattgaattattcgggttaactgatgaccttattattcaaaatcaaattgattcacaaaatttgtaattcagtaaaaaatgaattattttttaccaatctgataattgacaattacattatggacaatattgatcaaattattttaggtttacttaaagataacgcacggatgtctgtaaccgaattagccgaaaaagttcacgtctcaagagcaacgattaaaaagagaatggagtatcttgaatcttcgggcattattaccggatatacggttcgttttaaaccaaatgcggaacggaatgtcattcgtgcatggatgagcattatggtcgaaggcaccaaagcgcagtctgtgattaaagaactacgcctagaaagtgcggttgaatgtctgcataaaactaacggtaaatgggatattctggttgagctacgttccgacactttagaaaacttcgataaagtattagagagaattagaaatatttcaggtatttataacagtgaaactagtattttacttgctagccataagacctaatcactgcgttcaaacttaaattaaacatggggtgagccaactatacggctgagctcatccattccctttcattcaaaaatttctctatcgccgctcgttaaatctaaaagtgccatcctcatgatgaacctattctaacaatcctcaataaatttttaattttttaaataatcaaaatcaaaaacttaaaatctaatttgatttaaattcccactttttcactcactcccctcatcaaagcatttgacagaaaatttaaaacataatacatatagtattatatgttatatgttaaaacctaaggacaaggtataaaaaatggctaaaactcaactacaacacttcattaacggcgaatatgttgctagcaaaggaaatgatttcttcgatttggtaagcccagtcactggtgaagtctatgcacaatcgccgaatgcgaccgaggcagaagttgatgcagcttatgctgctgcaaaagaagcatttaaaatttggggacgtagtacaccttcgactcgtcaaaaagcattacttaacttggcagatgccattgaagcaaatgctgaccgtttaattgaagcgcaaagccgcaatacaggtcagttaaaacatttaattgcatctgaagaagtaggtgcatcggcagatcaagttcgtttctttgcaggcgctgcccgcttactcgatggcacagcaactggagaatatttagaaggtttaacttcttctattcgccgcgaaccagtcggcgtggtcggccaagttacaccttggaactatccactcatgatggcggtttggaaaattgctcctgctttggcagcgggtaatactgtcgtattaaaaccaagtgacacaactcctgaaagtacccttttacttgcagaaattgctgcaccattttttccgaaaggtgcatttaacgtggtgttaggccaagcgcaagtcggttcaaaagttgtatcacacaaaacccctgctcttgtttcgattaccggttcagttcgtgccggattacaagttgctgcttctgctgcggcaaatttagcaaaagcccatcttgaacttggcggtaaagcacctgtactggtttttgaagatgccgatcttgataaagccgttgaaatgattgctttaacaggctatttcaacgcaggccaagactgtactgctgcaacacgtgtgattgtggctgaatctgttcatgacgagtttttagctaaactcgttgaagctgcaaaaaatacacgttttggtgaacctgatgaccaagatgcactttatggtccacttaacaatgccaatcaattaaagaatgttaaagcgtttatcgacaacttacctgctcacgccaaagttgaaacaggcggaaaacaggcagaccgcccaggcttctattttgaaccgactgttattagtggcctaaaacaacatgatgaagctattcaaaatgaaatttttggaccagtgattaccgttcagaaatttaccgatgaaaatgatgccattgaaaaagccaacgatgttgaatatggcctagcttcaagtgtttggaccaaagaccatgctcgtgcaacacgcctgtcacgtgaacttgatttcggtacagtttggattaatacccatattcctttaacagcggaaatgccacacggcggcttcaaaaaatcaggatatggtaaagatttatctggctacggttttgaagaatatacccgtgttaaacatgtgatgagttcaaatgaataataacaatacgttttgaaaggagatcaaaatgaataagcaagaaatgaaagacttggtgactaaagcccatcatgagctctttaatttgcatgacaccactgctctagaccgttatttttctgaagactttatagaacactcgccactcgttgcaaatggtatttcaggtcttcgtcaattggtagaagattgtcccgatatgcaacacgaagctgtacgtgtactagcagatggtgacttggttgcaattcatggccgctttcaaggcttagatgaaaacccattggttggttttgatatttaccgagtaaaagacggcaaaattgtcgagcattgggatggtcttgtggcagaagctgcaccgaatgtaagcggtagaactcaactagatggtccgactgaaatcgtaactcaccatgacccagagaaaaaccgcgagattgtgacgtctttcttcaagaagtcattaatcgatggaaattatgaagcctttaaagaatataccgacggcgatcagttcattcaacatagtccagatattggtgatggcgttaaagccgtgattgattttttgaacaatatccgtaatgaaggacaaggtttggtatactcaaaaacgcatcgctccattgctgatggtcaatttgtattgacacattccgaaggcagtattgccggaaatcgacatgcctattttgaactatggcgtgtagataatggcaaaattgttgaactttgggatgcaatacctgctgtgcctgaagatgaacaggctgtccatggttatggcgtgttttaataactatttatccgcttcattaagctaagtcttttgacttagcttttagagaattcgccatgtcagcatatacgataatttttgcacctattgctcaagcaactcgttcggaacaagttgtagaacgcttggaaaatgcaattatctctggtttgctcaaaagcaatgaacaacttcctaatgaagcagacttagcacgcttaatgggagtttcgccaattactgttcgcgaagcattaaatactttacgcgtaaagggtttaattgatacacgtcgcggaagaaatggtgggagttttgtttgtgagctaccttcggatttacttttaaatcaacatcctttgcgccaagcttcaaatgagtatcttgccgatttaggcgagtttcatagtgcaattttaagtcatagtgcctatctggccgctcaaagaacaactgaatacgaacttaacaaaatcaaagagttgattgatcaatttgaacaagccgttgaagcagatacacgtgcacagcttgatttacgttgtttactcacactcacctcatttgcccaatcttcaagactggcaaatcaggaactcacgattcaggctgaatgggctccgctcattgccgtgctttatcaagatgatgattttcaccgtgaagttgtaaagcaatatcaccatcttttgtcgtcttttattgacaacaatgaaaatgaagctgttattcaagccagaagaatagtttcaatgctcactgaccaaatgcttcgatataagttatcgagtgaataaaaataagaaatgagatggcttattaatacacaagttaggaatatggaattttaggagttataggaatgacccaacatttagatgtagaagaacttcaaaatttgttaaagacggtggttgacgaaacaacctctattacggaaacactcgcaagtaaagcaagtaaaattctgtcaaaacacgcttctgaaaaaaatgcagatattaagctttcaacttcagaacgcgctgctttgcagaaagaaattaaaaaagcactctctcagagccattatagtcaaggtacgggttttgcaagttatagtccggcaactcaagatgagcaagactattggacgctagaatggtggtataaaaaagaagatcaattacaacaagcgaaacttgaaaactaccaaaatgcgcagcgctttttagatttccgctcatttgagtggttccataaacctgcacaaaataaaagtccatgcatacatggtccttatgtggattatatttgcaatggtgcctataccattaccattgctcaccctgtcatgattcatgaccactttattggcgtcattgcgaccgatattttagtttcggcccttgaaaaactacttatgccaaaactcaaaaatattaagcaaaaggcggtcattatgaatgattcatctcgagtcattacttcaaatgacattagcatcagaaccgggacattatttaaagataagactgatcaacagtttttctcgcaaccctgtcagtctttccagttggttgtcatctaaaaagcaaagaatattggccttttattcccgctttagtgtaccaccaaggtgatatagcactttaagccctagctgttgttcaaactttcttcaaacagacttgtttattcaggtctaggggaagttttggcctaaaaatagcatcgcctttctggatgaaaagcaaaaacaacgaaatttgaggttgaaaagacatggaaaataaagcgtcttccttaaaaaaactatcgctatggcaagtgacaattattggtattgcctatatgacccccatgacggtttttgatactttcggtattgtttccggaattaccaatggtcatgtccctctcgcatatttacttgctttaggtgctatgttgcttaccgcttggagctacgcaaggtttagccaaaattcggaaaaatcaggctcagcctacagttatactgccgaaagcttaggacccaaaagtggtttttttgtcggttggtgctctctactcgactatctgttattaccactcatcaatgtgttactggctgcaatttatctcaccgcactaattccaagtttgccttattggttttgggtgctggtatcggcgggccttgtgactttagtcaactgtttccgtattcggttacttgccaacttaagcctcgtgtttgtgttcgcacccattatcctcatggtcatttttgtatatttagtggtccggggtattggctctactcaaggttacgaacatgtacttaccttggctccgctatggcatggtcaacaatcactgttaccacttgttgctggggcctcagttctatgcttttcattcttaggttttgatgcggtcaccaccctttcaaatgaaaccaaacaacccaccaaaaatattccccgtgcagtcatgttaaccacacttgctggcggagctattttcttcacagccgcttggtttattcagctttattttccaaataatgtccgttttcaccatccttcagaagcgttaccagaaattgtgctttatgtcggtggtgctttgtttcagtccatcttcttatgcggacaaattatgaacactgtcgcctctggccttgcctcacatgccagtgcttcgcgtttactgtatataatgggtaccgacaatattttccctaaaaagtattttggaaccatccatagctctttaggcacaccctttttctcggttttatttgtcgggcttatttcaatgtcggctattttcttagatttagctcaagttgtcagtctgatcagttttggtgcgcttgttgcgtttacagccgtaaacttctcagtttttatgaaattttatattaaagataaacaacgctcaggttttaaaaataaatttctaaacctatttttaccgctgttatcggtcatcagcattatttgtttatggctcaatctcgactcgtcttcactgacttttgggtgcttctggttggctttaggcattctcctattcatttataaaacgattaaaaaacaaagtattgcaattagtaatgcttattaattttttaaggaacttcgtcatgaaaattatttctaaacctcaacttttaaaagatgtggaatacaaaccaagtcagtctttacaagtgggtaaagaatggagctggttaaatccaaaacacgcgaaatttgacgcaaccacgattaacggcacttcggtagataacccagcaaactactatgaaagttccctctcgaattggcatacatttgacagtttaaatgctgacatcgagtgtgatgtggtggttattggtggtggcttattaggttcatcaactgccttacatttagctgaacaaggtgtagatacggttttattagaaaaaaatcgtattggtagtgcagcttcaggtcgaaatggtggacaactcaccccaggtttagcacgttgggaagctcaagaaatggccgaccgactcagctacgaagatgccaaaaagctatggcattttacctctactgaagcgatgcaactgattgatgatatctctgaaaaataccaactcaactttgaccgtaaatacggccatatcactgccgccgttcatgagggacatttggttggcttaacacaaggtgccgatgcccgaaaatacttaggtgaagaccatacccgtattgtgggtaaacatgaactcatggactttattaagtcagactactatacaggcggtttaattgatgagttaggtggacaaatccatccgttggctctaaaccgcggcttaatttatggtttttgccaaaacggcggtactgtttatgaacaaacagaagttatttcaatagaagaaaaagaagatggtatttatgttcacacagcaaatgcagtcgtgaaagctaaaaaatctgtagttctggcagtacaccatgcctcgtttaaacttttatctgaacagaacaataccactattccattttatacctatgtcgcgaccaccgcccctttagagcttgataccaaagagcttctgccatttggacatccggtttatgacactcagttccagattgattactaccgccctgtctttaataaccgtttactgtttggtggacaaggtacaggaacatgttggggaccagagaaaactctaaattatctagagcatcgaattcataccgtattcccgcaaattaaaaatctagagatggatttcgtctggagtggaactaccgatttaactgttaatggtgcagtcgatagccgtaaatttggcaacaagttcccgatttatgcagttcacggctggagcggtcatggcgtagcgcagacagtacgtattggtaaagccattgcaaatgactttattgggcaatcgaatgactttgaaatgttatctaaaattgaccatcaaaatattatttttggccgtacgcttgcccctgtcgttattccactcgctaaaagtatgtatggcatcggagcaatgattaacccaggcaaaatggtttctttctaatttataaaaacgtcattttctaaaaaagattcgtacagttttgtgcgaatctttttatatcaaagcaatattcattttcaaactaggttatcccttttcaatctattacaataacgccggcttctttattcagcgcatagtattttgagtaactcatcttcccaactaaaacgtggacttaaaaatcgtcacatccagttaatcgctatgggtggtgctgtgggcacaggactatttttaggctcggcacaagtcattcaatctgctggtccttcaatcattttgggttatgccattgtcggtttggttgcatttttaatcatgcgccaaatgggtgaaatgattgtcgaagaacctgtagtcggttcttttagttactttgcacaaaaatactggggaagatttcccggttttttatcgggctggaattattgggtagtgtacattttggttgccatgaccgagcttaccgccgtggctaaatatgtacattattggtggcctcatatacctgcttgggtttcagttttatttttctttgtactggtcacttgcttgaacttaggcaatgttaaattttatggcgaatctgaattttggttagctattattaaggttgctgcggtcatttcaatgattgtatttggtttatatttactgcttaccgcaggtaatgactctatagctagcttttcaaacctatggcagcatggcggatttttccctcatgggttctcgggcctgttttatatgctcgcctttttaatgtttgcctttggtggtattgaactcattggaatgacagcagctgaagctgaaaatcctgaaaaaagtattccacaagccattaaccaagtcatttttcgaattttggtattttatgtggcttcactggcaattattatgtcgcttattccatggaatcaactggacctcggcggtttagataagagtccatttgtcatgatttttagccaactgggcattggttgggcggcacatttactgaactttattattttaactgctgccctttctgtttataacagtgggatgtatgccaatagccgtatgttgtacgggctagcagttcaaggcaacgcacctaaagtttttgcaaaagtaagcaaacaaggtgtacctacatccgcggttatcttttcttctattctaatttttgggtgtgtattacttaactatttcataccagaagaagctttaagctatcttatgtacatggctgtagcagctttggttttaaactgggcaattattagttttacccatttaaaatttaaacgttcgatgaagcttgaaaataaaattgctaaatttcctgcactattttcacctttgagtaactatatcgttttgacttttattggcatgattttatatatcatgtggactcaaggctttgaaaagtcggtgattattattccaatctggattgcttttatgtttgggttatatacaattttgagttggaaaaaatcactctaatcttcaaacaaggcttattcaaacaagataagcctttattattttggggtttacaaacaatttgccttcagaacaaaccaatcatgccatatgcctatttctaatttaattcacaataattaattctgagatattttatgtagtctttattcattctaaaacaagcaattaagtcatactcaacagatcatgattaaaatacaagtgtttacatgatctataattatttgtgcttatgttcagctaaaatcgaggctgacaaagtatattgttgcgatgcccttctaggaaaaagacacttcatctaacccagtgctttacccacttatagatttcgcgctatttactgcgtcgctcaatgatgaaagacaggaaaattttatggaaaaaacactgcaatgtccgaaatgtggttctacagaaattgaaacacgtgatcatgacaaattacttaaaaccactggcggtgttttattaacagctgcaggcactacggcaggtactgtaggcggcgccgcaactggtgctactgtaggggcagcgattggtactgttgccggaccattaggtgtaattgttggtggaactgtaggaacgtttgtcggtgcaatcagtgcaggcattactggtggtgtggtaggtaatatttttggtaaaaaagcaggcgtaatgattgataaaaatatatttcaggactatcgctgcttgaaatgtaaataccgttttaaacagaagaaataaccctatttcattaagcttatttttaaagcacgttcatgactttaaaagataggaaagccactatttaggttgctttcctccctctcttatctcatcttattcaaagaaaaaaataatctaataactaactattaccgatactatattttatgagtagactataaaaatcagtcatttactttacgctattcataagatatgaaagaattgtggcctcatataacttttgaaatttaaaatgaaaaaattattacttttaagcttaattagcattttcagctcacatagttttgcagaggacaatagctcgatttatcggggacttggtactggtcctgaagattttttaaattttcaaattcttaaacaaaaaggtttcctagccaaaaaacctaatgtttcaagagtagactataacgatatatacaaactcaaaaaaccttatgaatttatgggacaaaacgttttgcttatttcagatgaatatatgtctgaatatgtgggctgttgtgtgagtgaaggttggggagctgtatttaagcaaaccaccaatttaaaattaattgaaaaatttgcaaaaaagaatcaatgtaatatcgctccgatagaaaccgatagcacttactatgggtttaaaattagttctctgccaaaaggtaattactatgaattatcatgtcgcgaacgtgacttggctcagtctgaatagataggaattaactgttaaaaaataagagccaaacaagttgtttggcttagaattttaatagtaaaaatattgtttaaaaagcctctttaataaaatatttatatttttatcatcttataaatttgactagaatagctagtttacaaaatcaatagtaacaaaaatgttattccagctagttatttaaccaagaaatcattcacacaaatcattcccccacttatagtaacgatacaaaaccgtattaacattatagttagttattttcaactccccgcctttataatcttgaatcttgccaaaggttgggttgactatattaattttgttatttggacctaaacaatatgtatcaactccctgcccttgcccttttaacacctatccatctttatctaaatacctgactattttatctaatttcctagagtctttagtaaattcaaaataagaaacttgtgcttcatatttatttatagaatctataatttcaatattatcgcctaataatgctttcatcttcacttcaaatggatatttatccgcaggctgttcatacactccattagaacaacccacctgtaaaaacaagaaaaataatgctatatatctgaataaattactcacacaaatcctcaccccatttattataggaatataaaacagcattcacagagtaatctgttcgttttaatttcccacctttaaaatcataaagtccaccagaagttggtataacaacattaattctattatttctccctaagcaataattatcaacgccctacccttttcctttcaatacccatccatatttttctagtaaacttactctactttcaattttattattacttttaggtaattcaaaatatgaaatttgtacctcagccttttttaatgagtttataatttttatttgattaccaagtaattctttcattttattttcaaatggatatttatctgaaggtggttcataaacactactgccatatccgactaatagtaaaatagtagtaattccaaaactcaatttatttaatttcatatttcaaactgataactcacccaatttaataaatgcgataatccgccattaattatcgcatttccatttcatatttagtataaatatcttttccacaagttataatatattactttcaaccaacctattaattattcattttttctaaataaataccagcttcttgattcccagataattttgctttcttaaaccattcttttgcagtttctatatttctttcaactccctctccatttaagtacctaattcctaattgaagttgactatcagcatctccttgtaaagcagatttacgataatattctacagattttgataagtctttttttacaccataaccattaaggtacattattgctaaattatattgagactttgcatcactctgatcagcagctttttgataccaattaatagcctgtttataatcaacatttaaatcatactcaccgaatagatatgcatcacccatttgtgactgagcacgaatatctccctgttctgctgcactttttaaattttcgaattcagaatttgctgaactatcagggatattacaccctactaatatactgaatataaagatatttaaatatttactcataatagactcaaattttaaaaaatactattaaaaaactcattttcaaaagtaaatctagcactccttaataccaacaacaatttcaataaaaatattatatttaattaactatatattgttcttagtttatataaaatttatctaaatttagaacaatttaataaatatttattagcagctacattctttttttataatttctatatttttggccgcctcttgatctccttgatcagcagcaatttgaagtaattcaattgatttactaatgtttttttctacccctctcccttcatagtacattccagcaagtattttagcggcatctccatcttttccatttataatagccttgttataccaataggcagccttttcatagtctaaaggggtcccttcgccattaaaatacatattgcccaaattaaactgtgcacttaagtcacccaaaaaagcagctctattaaaaagattaaaggcattattactatcctgctctacaccaactccatccttatacattcttcctaaaaaattaatagctactctattatcttttttcgaaagttcagaaaaagtatctaatgccttaggaatattagtatatttagttccctctgtataataaattatacccaaattagctttggcttcctcttcaccttgttcggcagctttttcaaaccaatacaccgctttatctaagttaaccttattaccatttaatccttgttgatatataacacctatattgtattgagcaactgggtcaccattttctgcatctttttcatatttacttaactcactattggagcttttgacttttatattagaagaatcacatcctaccaaagttaatgtactaaatataaatattgataagaaaattttcatattatctctcatttaaaacatgccttggtttggaaatcaagtggatgatagcccattttggaaggagcctcaggaattcttggagctggcggtaatttatgatcaacagttgactgttggctgttggctttgtgaagctttgaaattatattctcaatctttagtagtatgtatatgatcataaaactattcttattattaaaatcagtaattagatagattataattttctatagatacaggcatatatattttattaaaattgatctatgaaaatccttctttttgaaacgttgttttttcgtttatgttactttacgttgcaaattgagcaagtagaattcttgtatagtaaattaacacccattaatctatccgagataaaagatgttatcaaaaaaaatttttctaactgtttgtcttttaagtatcttaagttcaggttgtgcaaaatctgtcaatcaagctaatgacaataatgaacaacagcactctaatcagaataatatagataatattaatgtaaatgatatccgatcaaaagctgaaaagggagatccggaagcacagtacaatttaggtgtaatgtatgcagaaggatataaagacattcaacccgatattctaaaagctattgaatggtacactctatctgcaaatcagggttatgttaatgctcaatataatttaggtttattatacatgggaaatgagcatattaaaccagattatgctaaagcaaaatattggtatgagaaagccgcagtacaaggtgatattccatccttaaacgaacttggaaatttctacagtaaaggcttaggtattaagcaggactatcaaaaggctattaaatactacttagatgctgcaaatgcaggtgattcagatgctcaaacaaatcttggcaccatgtttttacatggtagaggagtaactcaaaacaaggaagaagcttctcaatggtatttaaaagctgctatccaaggagatattgatgcccaatataatttagggcttatgtacttactcggagatggtataaaacaagattatcctcaagcacaaaaatggtttttggcagctgcaaatcaaggcgaaagcaatgcacaatttcatctcgggaaaatatataaagacgggctaggagtagataagaacttatccttagcccgtacctggtttgaaaagtctgctgaagcaggaaactcatatgcagctcaagaattatccaagatgaactaatatctttatatttagacaggtttctctttaatatgttgaagggaagccatgtgctcccaaatcccaactatgaccaggaccatgaataatagatgggccatttggattaccaaccatttctttaccttgactaatagtaatccctctcgctttactttttgacttatactcatctttataaatataagggcttattttatcagtgtgtgagcccgcacagtatttagattctcctgttgctgcacacccttctatataacctctattaacctgtctttccccataatggtaattacgttcaaaaaccccatactcataacctaaacctacttttcgttccattgttaaggtactttcaccattacctttataattagcgtaaatcccaacaccaactcctgctgtcgctgagccgcctacagatttccctgctgcatatctttcagctacatcttttaaacttttacttgttgcatacttttcatatgtatctgatgctgattttacacttccatatgaaccaatcgaattcgtcgatgcaagcccacgcggatctatccattgagttggatcacttacataagcagaggtattaattccgccactcaaaccaatcgggtctttacttacatatcttgcgctatgaggttcataataacgataacggttatagtgcaattctgtttcttggtcgtaatactggccttgaaagcgtaaattattttgttcaaatggattatcttgatttagtgctttaatttgcgacaccgcgccccatgtgtcttggagaatttcccatacacactctcctcggatattagtcatggtttgtggtgttccgacctgatcacaatggtaaaatgtgatttgctctaaatcagcacgctttttccgagtagtactattccatactgggtctttataaatagaatatggttttgtttgatattcctgataatcaggagtttctatcagttgaatgaaatccttataacctgtttgtaatagtggaacaaagctatcaggttcataaatatagtgctttgtataattggtctgtgcagatttaaaagactcccatatcattaaatctccatcccaaccaaataaggttaattctttggctgtttttttgtagagtcgacgaccaaagacatcgtaaccatattctgtaactagaccattattatcacttcgaataagtctgttttgattatcccaagtcagtttaaggtttttgcccgcttgaataatctctgtcacattaccttgaacgtcatattggtagtgtttacctttataacttttaataaggttatttttaatttgtgcaggacttaataccgagtcagaatcaattaagttacctgctgggtcaaaattaaagctttctgttttatgtaaactttgagctgcaattaaacgcccaattgggtcatattgataattgagtttacccaaacggctatcttcaacttgactaagcaaatagtttttatcgtagtgatattttctatgtgcttgatattgtaaatagtcttgagtttcttgctcaggttgaatgaactgtgaactcaataaccccacatcattatattgtttggtttgcatgagcccatttgctagtaatcgtgttgtttctctatgcaaatcatcacgctgaaatgaaacaacctcttggttatttaaaccaattgcataaatatgccctgaaccataaacaagatgattcagtgtatgtccatcaggtcgaattgttttaattaaatttccaagctcatcatattcataatgtaatactgctgtgagcggtttcagttctggaattttataatgctggtgctctctaaccaactgcccaagtgcattgcgatagaaatcaatttggctaacctcattactggctcggctcagttggctattgaggttatagtcaaattgttccgtttgtttctgccctgtatgtaaatgggtaaagcttttcgaagcaatttgtccatctgcataataatcaaattgggtcagtatatttggttgacggatttgaaatatccttccgttctcattgtaactatagtgcttttcctctccatcaaaggcctgttcacgtatcaaatatccatacggattgtatccaaacaaatattcggcttgattctggttgattagcttttgaatgcgaccttgtttgtcccattgataagctacactatgtcgattggcatcaatacgctgctctaataagccaacttgattgtacttatattccgttactaaacctttggtatcggtatgtttaagtaagcgtccttcttcatcatgttcaaagtattcttttaacccatcaggataaataatactttgcagctgtcctttatctcggcctttgatactgtaaaaatactgtacaactttattatttgcagtttgttcagctgtcagtacaccatcttcatcatattcccatgtactactcttacctgagcaatcggtatatgaaatcatctgccccaattcattatactgaattttcttaaccccaccttttgcatcaatgacttcaaccagttgattatcattgttatatttgtactgtgtgatatgccctaatggattgatttccttattaagattaccattttcatcatattcccgtttccaaatactgccttctgggtctttaatttcaactaagttatcctgttcatcatatgcaaaacgtattactccgccgtttggctggacaattttaacaagttgatcttgatcattatattcctgttgagtctctcgcccttcaaaatcaatttgtcgagtaatgcgctttttcccatcacggctataccatgactcacgcccatccgctaaacgagttcgataagtaaacccattgaggtcaaagtaatagtaggttggtacatcataggcgttataaaccgccacttgacgtaagcgcgggtgccattttagtttggtatggaaactaccatcatccgcccattcttctactgctttagctttggcgtctgttgattcataacgaatattctgtccacgccctgtacggtctgtatagcgtgttagttgatgaaagttgttatattcataagttcttgtatagccattctgatcaatagctttaattaagttcccttggatatcgtattcataacgtgctaatggttcggctttatcatctaaaaacaccgccataattttaacttgctcattaaaagcaaattttaattggtgtttggcatgctctaactgaaaaacaacatattgaagataagcaaccttttcaaaaataagataacttaaatcaattttttcttgtgttttttcattgaattgttgaatcaattgataaggctgtccgactgaaaactgatgaaattgaaaagtccagtctcccccaaagtttagaaccagatctccatttttaagaggttgtattgttattccctcataaggcacttcatatgtttcaaatgtaatggaagctggcagttgatgctttcgccctttactatcaataaatagatagcctttggcattttgttgaatcatattggaaaatggcatcatccaacgtgcaccgaccatactttgatcaaactcatccatttgtgagttatattgccgtgtaaaagaaaaacctatttttggtaaatagaagtctgcatgttgaacccgttcagcaccaattgaatagctaatactttttccagattgtgaatcagcaccttcacatggaggagcatttaaagcatctgcctgcaaacttacaaattctaaagtgtctcctttcgtatgccgttcatattcacccgtctggttgactggcacacttgcattacctttattttctaatgcttgtatagctttcagtgtttcttgtaatagccatgccaaagtatatttttggccagcatttgcttgttgctgtaaagtttgacttaaagccgcaatagcttgagttgcttcttgttgcaaacgacttgttatatttggttgtattttaggggttaaatttgcttggctcggcttccctaataaatcaatgagtggaacagcccagttggtaaatttgagtttcggatctcgtttttctgcacttgcacctgccgcagtggttattcctgcatttatacctgttgctggggtcgccatgctttgtagaatggttacacccaatgttgtagcgctagtaagtaaactgcttaacttcgcttgagtctcttttaagaagttctctagatctccagcgatcatcgcattgagatgtaaacctaaacgcttaatatccgtttctttaatttttccattttctcgatataagcactctgccattaagccaaacatcggacgtaaagccattcgtgcatgtgcttcattattcggttctgaaaataaaccaattaaatttgccgcaagtaatgccccacgttgtacagcagcatcaccagtttttttatctgtagcatagagcattagatctagtacactacccgtcaatgcaaagatattagcaactgtggttatattggccttactttttatttgttctaatgaggtgtttccacacacttgtaaataacgctgaacctgacttgcgaccatttgcaagtccgctacatccgtcacgctatttaagttaaaaacagcaagttcaacagcaggttgttttttaatttctttctgttgtgtattctctttagccatcaatataaaacctttaattcattcaattgcagcaatatttttctaagttgaatcgctctattcatccaaactacttttttgaccgtacaaaagtatctaaatcgccctgctgaataggtgactcttgatttgtggtcttaaataattttgcggtcatttgatcactcaaaaaatctccgccctgctctttaagcatttcaagagattgacttggattcgtcgccatttgaccaagacttttcatttgatcggcagataaattgagattaagttgttttgaaacagtattaagggcagtattagttacctgatttttaatctgggctactgtttggccagctaaattatctaaagtattcttacctaagtttttgaaactatttttatccgttgaaagaagattattttgcaattgagacatcgtattttgccccactgcttctagggcatttttcattaatccttgaacacttttgactggttcagcccacgtataattacgtttaaaatcactgctttgtagccatgcacttgtattatccttctcaaaaactactttagctggtccgggtgcaatacctgttacttgtgcaaaaccatttccatcgagtttgcccgtaatttgcttacctaatgaatcaatgactttatagctattttgcttgaagaagttatctccaccataactccgcagtagctccaatgctccctgcataggtttagctttaggcaactcaggagcactggcgtttgcactcgctcctcccataaacaaatgctgtccagcattgacttggaatttcccaccagttttcggaaagattcctgaaccatttagagtaatttgcgatgagccgcccgtgattttgacttctttcgggctactaatgatgaccttgtcatcggttgatgaaatagtaattccaagtttactcagtacatccagtgcatctgcctgagcttgtatttctaccttgccttgtgcagcaacagcttttagcccgctctgagcagcaaaaaggctgagcctattttgggcatgggcaatcacattcttttgagtacttatattaatgctatctccagcaatctgattaatttgtgcatcagccgagatgtgaatatcttctgaactacttagagctataccatccggtgaactcaaaagaagtaaagctttttcgaatttagcgatttgctgctgaatttgtgaggcaaaatcttttaactgttcaatcgattcgatttcatcggttttctggtttttagcaatgtcactcagtgctttactgttagtttgactaccttcaagttgctttttcgcaacttcggcatcgaggtggtctcctttggcgttatcctgtttatgggtggataccaataagccttgcccagcgcgcaaagctccccattggtccgtacgcagttcaaatccttctccacggtcttcactttccgctttatctttaggatggctcaatttcccgaggtttaactgacttgcaccatgactgctttgtagctgagtactaatttgtcccggtgtatcatcaaatctgagttgcccaaacccaccacctgacacctctttagaacgaataccacttagctttttcgtatcgggaagcttacctttgttatcaaatttagttggatgacgctgtgcctcatgcactcgacccatcacaaacggtcggtcaatatcgccattaaagaagttaataacaacaatttcaccaatacgcggtaaaaaacgtgcaccgtaaccttctccagcccatggcgttaaaacgtcaatccaagctgaatcggtgtcattattattggtccctgcgcccccatcatggctatggtcatcactacgcgtaaataggaagcggactttaatacgcccccactcatctacatagatttcttcaccttcaggacccaccactttcgcacgttgtggatgagcgactgggctatgagtctgtgggttataagctggtgttgttggaatataacgacgttgtaaaattaactgattcgcttgacgctcgtcggtattactcgcttgccaatcgctttgttgaactaaagtttggatttgctggtttaaatctttgggtaaattattttggttataataattcttacctatgattaaaaactctttatctgtgctttcatgctgatcaatttcagggtgttcattgagttcaaaccaatagccaacttgtgtatctcgtactgtggtttttgcaataaactgcttagactgagcatcataataagcacttaggttctggttaaacttttctagttgttgattacttgctgaggttgccccatcttcgccatttaaatcctgcatccatgccggactaaagtgccatgcttcttcaaggcttaagctttgattgtcgtagttagtactatgctgatgtttactttggacactacctgccccatctgtttgttgtaatacgtctggctgccaacgctgcacaaatatagaagtcggctgtaaactgcgatcagccattaggctggtcatgctatcaaattgttcagttgcactactgcggtggtaacgaatcgctcttcttgtcagagcttgatattggttattatcatcaataagacgtaatttttgtggctgaatattgtccatattgctcgccacggtaagctctgcttcatcaatgagccagctaataccttcactacgccataagcgagttaaaaagtcatagtcgctttcattgagctgcataacaaaaggacggacatcgtaggtctgtttcaagccgctcaaatctagagtcagactagaagcaaataatgggctttttccttgccactcttgaaacagaatttcactaatttctttcacactcttgttcataaacacacggctatttctgcgtttatgccagagataagttggatcacttatagcaagtttatataaagttaaagcaccatcactttgcccttgtgatgctccagtaataatacctgtagtacggaaaaaacttcctcgatctgttacttgatcaacagcaacctgcaccccaataaatgttttgagtggaatatgagcattggttgataaacaaatcagctcggctgtcatgccctgattaagataatgttgcccatctatacgttgtaaaaaaacctgactattcagggatgcatctgaaaactggagatacaccgaacgatgctgtgagagaaaaccaaaactctctaagatctgaaaaatattattaaacatcacttattttataaatttgagttgcaatcgactatattttataaaaaatagacagatttgtctatcttgtttatattaacttcagtttcaaccttagtcttacaactattttataggaaaaaaatataatactaaaacctgagtaaattatgctaatttgctataaatcagagttaaaattaaaaattatcgccaactgaaacaagtaagaataaaaacctaaaatcatatgctgtgcaattaattagttttcctctctagcgtactggcataaaaaaaccgctccaacacctcatccctctcactcaaactattggtacttaaaaacccaaacatcaaaccatctattaggtttaaaaccatatcggcatcaggttttaaggcgcgagtttccaaactaaaaattaggtcaaaaaattctcgaattagccattttctatactcgattgccatacggtaagcctgaggatatgtccctttaatttcaaaaaaggctttaagtagcaaatgatacagactgttagagttaacatgtagaactactatttccttgagcttaacggttggcgtgcagtaacggtttgagtaaataatcgcgagtacttcttctttcagcaggctcttttgaaaggcgatacatatttcaattagaccttcttttgagtgaaagtagttatagagcgtagctttcggaatttcggattttttaacaatcagatctacacccgtggtgtgaaatccataggtggtaaataagtttatagccgtacgaataacgtgtaattttttggaagaggtttctaaatttggcatagttttaccgttataaattcttgttgtttctaaatgagatacttttttgggagaaaaaaaggcacagcaaagccatgaagactgtgcttggcacatctcaagttttattgttgatgcaagttttttgagccgtaatgacttaaagcatgaaaaccctacaggtgatcaagctgctttaaattgttaagttgtgtcgttatagcttttggcaaaggctgccaagaaataatggatgtgcaaagccaactcctttttattgggagttctgccaaaacatttaaattaaggtggcagaacgaaagggggttagcagactggccgaaaaaacccagcacacccgaaggtgtccccctcccgttccgccgtagagggggcacgagggttcgtcactaaaagattgctcttttaatgcttttcggaacggtctgctaaaaccgactggcaatgtggccagcatgcgaagaatagtattccaccctcttgtagtcaagcacacaaaatgacatttgatttaaattagatcattaaaaagtaaggataaataatgaatgagttattgttaaagtagggtttataaagggattgaaatttatatagatatattagtttcaacaggtaagattaaaatataaaaatggaaaaccatgaaatgaaaatatctttattagatgtacaacaagtattcaatgatctattaaaccataaaattagccgtgaggatgctgaagaatgggcaagaaaaagaatgaatgcactggataaccaagacttaatttttgatcctccaattaaagaggagcttctttggaaagcggtaatatatttaagtggtgttggattaaagatatctcctgatacgtacatggaggatgatattggtattaaagaaatgtttaatacttattggaatcaataattttttcgcgaaaatttatacttttataatatcaaatgattaaagtacaacattccaaataaaaaaagctaaaccccgataaccgcgacttagctttaaaaaaataattttaattaaaaattacttatttgatgtctgcaaattcagaaacaggcttgttcacttcaacttttgtgcctccaaatttttcatttacaaacttttgaactttaggtaagtggtaaagttcaccaagcttcgtatagatcgggtcatttttgttcgcttcagcaacacccaataagttgacataaagcttagtagactgatcgattggctcacggaagattgcgtctttcattacattgaggccgccctcaagtgccaatgtattaccgagtacaatcgcatctacatcgtttttaacacgaactgccgtagtcatttgaattggttttaattgtaagtttttagggttttcagcgatatcattcactgtcccttttacagggtcaaaacctggtttaagtttaattaatttagcagactgcaataatgttaatgcacgagcttcgttagcagtatcgtttggaattgcaatggtagcgccttgcgggaactcatcaacggttttaactttatttgcataaatacccattggctctaggtaagttgttgcaacagcagcaactttagctttatttgaagcattataagctgccaaatagttgaatgactggaacgcatttacatcttgttcgccacttgctacagacgtattgagcacaacatagtcagttaaattggtcacttcgagtttaatgcccgcttgagcagtttcaggaagtgttgctacgtatttccatacgtccgtatcagaacctgttgaaaccagtttaattgtacgaactgactcagttttatctttggctgctgtattttcagtttgtgcaggttgcttattacatgcagtaagtgtcagtacagaggcactgaacagtacgctaaataattttttcataaatatatcctaaaataggaaacgcctcccctaaatcagagagagacatttccaaccattgggtcgaaatgcaatatttggctggatataatttccagatatagggtttagaagcctgatttcagcatcattccttccgtgaatttgcacgctgaacaatagaattatgttttgaaacagtttctaaatatggcctcatcatatatcaataaatgaatattctacaaataacttgttcgattctgatatataggccacttattactaagatattgaaaacaaaaaatatattatataaaatatagatttttgattaaaatatatactcgattgatttatatgaaattttcggcatttattagcaagatttaagctaaatgaagttgtaatttttatccttggcttaaaaaatcttcggtttcacaaagatttttgaatttggcggaagcgacaaaatttctcattagcaatataagctatttatataaattattttttattatttaaatttttaataaaaataaattttataaagatatattctattagctccaaggaaggtgaatagtatgaaataaatgatgtagaaaacttccagttcaaattagtgttactactaaatttaaaaacataataatgcatcaatatctctttaaaactattatgtaaatttcttgcaataattttttgtttcacacaactcagtgaaaggccataataaattattgtttgctttttatcctatttatttcaatttataaaaaatatataatattcctcaatagttttctaattatctattacattcattcatgatcatatattttcaagaaagagaataaaatgcaagaccaagctttgccatcattccctcaagatttaaatgaggatcaaagtattacacgtccaccaatttcatactcaggtattcatcattttaaatttcacggtaatgcctcagaatattttggaatttggatcgttaatattcttttaactattattactttaagcttatatgcgccttgggctaaagttcgtcgtttacgttatttctatggaaatacagagttttttgaacgtcgttttgattttactggtattccaaccaagattttgattgggcgtttaattgcattaggaatttacgtagcattttcaatttcatcacagtattcaatgattgcaactgtagttggaatagttgtgttatatatggctgtgccttggctaattcgcgctactttacgttttactgcaagaaatagtaagtatggtaacgcacgcttttattttggtggcactataaaagaatcttataaaattttccttttaagtatattggtatatatctttacattaggaatttttacgcctgtagctatttggctatataaaaaatattatcttaatcacctatatgctggacaattaaattttaaattaaacgcgacctggactgcatatatggctgcagtttatgtacccatttttattgctcttggcatcattgctatcttttcaattatttattttagtattttaggaacactttccgggttctcatcgaattctgtaatctttgggatatttatgatgtatgccattattggattatttatttatccattaattgctgcgcgtcttttcattactacatggaacaatactacagttggaaacagtcaatttaaaacagactgtaatcaatggcgttttgcatggattgtagcatcaaactgggtagtaaaaatcttaaccctaggtttaatgtctgcttgggccgctgttcgcattcacaaatatcaggttgaatcaatgagcttaatcttgctagatgatccagataaaatgatgaatctagctcagcaagaacaaagtgctttagctgaagaaatcagtgatatttttgatattgatatctccctataataatctgagtttaataatttatgtcccaagcagtagatatcattttctatgatggcatagtgtctaaaccataccgtgctcagatttcagctcaatctaaaactgaagttctgattcgatatggtgagcaattagaacaacagcgtcattatcaatatactgatatgaaattgattggtgctctgggacagttacatccagtaattgaattagatgatgatgcacgaattgaatttcatggtgcattacctgaatggtttaattattcaactaaaaagattcaacattcgatttggaaatttgaacgttctccaagtcttattttttttagtttaatttttgtgattactttcggaatcagtttagtaaaatggggagttcccgccacttcccattatgttgcttttaaattaccagagaatagtttaaagaaactaggagatgaagccgagaattatgtactaaataattggactgcacccagccaattagctcaaactcaaaaagaccaaattactaaacaatatttgaatactgttgctgaaaataaaccagccaaattagtgttccgtaaaggtaatcgattaggggcaaatgctgtagcactacccaataatacaattatcattacagatgaactgattcaaatagcccataataatcaagaaatattgggagtattagcccatgaacaaggacatttagtttatcgccatagtttacaacaaggattaactagtttaggactaagtgtattatacattgcaatgacaggtgataattcagatttatttacgtcattacctgctgctatgcttggtgcaaattactcacgtaaatttgagtccgaagccgatctatatgcattacagctgatggataggaaaaatatagaagtctcacactttgcaaatttcttacaacgtttaaacgataaaacagaagaagatctaaataaagcaagtcagtccacctcaccaacctctcaaaaagaatcttcagataataagctatctatagctgttgttgatgctttatcttctcatcctgcaactgaagaacgtattcgaatggttcatgattttgagaaaaaacaacacgctaattattaaatactagaagaattagtattcagacttaagaaattatgaaatataaaattaaactggaaatctaattctacccaactcaatctaaatttttatataggggaggatgaggggtaaaataatagatataaaaaaagcccctgcttttaacaggagcttttcgaatttggcggaagcggtgagattcgaactcacggaggactcacaccctcgtcggttttcaagaccggtgcattaaaccgctctgccacgcttccatgtgcgtaagaatacaaagcttattcattttattcaagaaaaaaatcatcgctttgtgttcaagtgcatattgtttcatcaattttacagttgggcagccaattctgctccttctttgatcgcacgcttggcatctagctctgctgcgagctttgcaccaccaataatatggtagttcgcgatcgtcgactcaccttcttttggcatcaagtcttttaccgactcttgccctgcacacaccactaccgtgtctacacgtaaaagctggtcttgaccattatgttcaatccaaagcccttcatcggtaactgctttatattgcacaccacgcaacatacggacaccatgctttttaagctgtgcacggtggacccaacccgaagttttgccaaggccaataccaagtggtgtggttttacgttgcaataaataaatttcacggattgctggttcaacgactggcggctgcattcccccttcagaaatgtagtttggatctgggtctacaccccattcacgttgccactcggctaaaggttgaggctgtggttgatgtggaggtttaagtaaaaattctgagacatcgaaaccaataccacctgccccaatcactgcaacttttcgtccaacttcagcaccctctaaaacttgagcataagaaaggacttgaggtgaattacttccttcaatctttaatgcacgcggcacgactccagtcgccacaatcacctcatcaaaaccttcacgttcaagttgttcacgattaacacgagtatttaaacgaacatctaccccagttttttgaagttgtactttaaagtagcgaatcgtttcgtgaaattcttctttacccggcacaacctttgcaaagttaaactgaccacctacatctgcattggcttcaaacagggtcactgcatgaccgcgacttgcagcaacagttgcagcagacataccggctacaccaccacctacaacggcgatacgctttggttgtttggtttttaaataaaccaattcagtttcatggcctgcacgtgggtttactaaacaagacacacgtttatttttaaatgcatgatctaaacatgcttggttacaggcaatacacgtattaatttcatctacacgattggtcgcagttttatttacccaaaaagcatcggccaataaagggcgagccatttgaatcatatctgctttgccagttgccaaaatctcttcagcagtttcaggcatattaatacggttagacgcaatgactggaattgaaatatattgttttacatgagccgtataatcaacaaacgcggcacgagggaccgaggtgacaatagtcggcacacgtgcttcatgccaaccaatacccgtatttaataaagtgacacccgctttttctaaagctttcgcaacagtaaccacttcttgcatagtgttaccgtcatgcacaaggtcaagcaacgataaacgaaaacagataataaatttttcgccaacttttgcgcggatcgctttgacaatttcaactggaaaacgcatacggttttcaatttcaccaccccaacggtctttacgctggtttacatggcgacttaaaaactggttaattagatatccttccgaccccataatttcaacgccgtcgtagcctgcctttttggcaatgtcggcacactgtgcataatcttcaattgtactgagaatatttttttcagaaagttgacgtggtttaaatggtgaaatcggtgattttattgcactcgaagacactacaaatggctggtaaccatagcgccctgcatgcaaaatttgcatcaaaatttttgaaccatgcttatggacggcgtgagtcactaaacggtgctgcggaatatcaaataagctattcatggttccgccagccggagccaaccatccttgacggttcggagaaataccgccagtcacaatcaaaccaactccacctttggcacgctcttcaaaataagctgccagttttgggtagttaaaaaagcggtcttctaatcccgtatgcatagatcccatgaccacacggtttttaatggttgtgaagcccaaatgtaatggttttaataaattggcgtaacttgtcatgctgcgtcccaatatttttttgcaacttgttgcatagtactttaatacttttttgataattttggatgaccaagaattattttttatttgagattatggtcaatctataaatgaagcagataatcccatatttttctttaaataataaatagccatcagaacaagtgaattaatgctttttttgccaaaaaaagcaccatgaatagtgctacaatagccgccattcagaattctcgagaccgcctcaacggggtctttttcataaatgttaggattagcaatgactgataatgcaactatcttgcagcatgtaccagtaggcaaaaaagttgggattgccttctccggtggtctagacacttcagctgctttattgtggatgaaacaaaaaggcgctgagccttatgcatatactgcaaacttaggccagccagatgaagatgactacgatgcaattccaaagaaagcagaacaatacggcgctgtgaaagctcgcttgattgactgccgcttacaattggcgcttgaaggtattgctgcaattcagtgtggtgcattccatatcagtacaggtggtgttccttatttcaatacgactccactcggtcgtgcagtaacaggtactatgctcgttactgccatgaaagaagatgacgtaaacatctggggtgacggttcaacttataaaggtaacgatattgaacgtttctatcgttatggtttgttgaccaacccaaaccttaaaatttataagccatggttagatcaaaactttattgatgagcttggtggccgtgcagaaatgtcacagttcctcatcgacaacggttttgactacaaaatgtcaaaagaaaaagcgtactcaactgactcaaacatgttgggcgcaactcacgaagcaaaagatcttgaatacctaaatgcaggtatcaaaatcgttgacccaatcatgggcgttgctttctggaaagaagaagttgaaatcaaaccagaagaagtgactgtacgttttgaagaaggtgtacctgttgcattaaatggtcagcgttttgacaatccggttgagcttattcttgaagcaaaccgtattggtggtcgccatggtttaggtatgtctgaccaaatcgaaaatcgtattatcgaagcgaaatctcgtggtatctatgaagcaccgggtatggcccttcttcatattgcttacgagcgtttggttactggtattcacaacgaagatacgatcgaacaataccgcattaacggtttacgtttaggccgtttactttaccaaggccgttggttcgactctcaagcgcttatgcttcgtgaaactgcacagcgttgggttgctaaagcgattactggtgaagtaacacttgaacttcgtcgtggtaatgactacaccatcatgaacactgaatctccaaacttaacgtacgaagctgaacgtttaacaatggaaaaaggtgattcaatgtttacgccaatggaccgtattggtcagttgactatgcgtaacctcgacattaccgatacacgtgcaaaactaggtatctatacagatgctggcttgctttcaattggtcaaggttctgctgtacctcaattagacaataagaaaaaataatttcttataaggtcaaaaaagccacctctataggtggcttttttatttaaagttaagttaggcaatttcggcaacttgtaacggttgataataaatttggttccgtccgagttgctttgcccgatataaagcctgatctgccgcatgaataagcctatcttgtcccatctttagcccacccgtatatacggtaaaccctaaactgatagtgacatacttcgacactaaagaagctgcgtgaggaatcgcttgccgctcaatggctttatagatatttgcagccactgaataagcaccctgtgcaggtgtttcaggtaaaagtacaacgaactcctcgcccccataacgcgcaacaaagtcgacatgacgaattgagtttttaattgctgcagcaatgctagagatgactttatctcccatctggtgcccgtaaaaatcgttatagtttttaaaaaaatcaatatcaataaataaaacagctaaaggacgcttctcttgatttgctcggtagtagaaaaaatcaaacatctcatcaaatgtacgtcgattcgaaatttgagtcagggcatcctgctggcttaaatgcaataactccgacgcttcaatccgtaagatctgttcattaatttcagcaagctggttatttaaaaaaaggcttctttctcttgagatgagcatactgctaatcgagaaacctaaaatacaactaccgaacaaagcacgacccagtgcaatatagtcacaatttacgtctaacaaaataagaaaagcaaaaactaaaaatgctgccaataaaccaacacaaagcatatgcaaaggtttaataccgcttaatatgaacccgagcatatataaaaatgaaagaagcaacatagactggttcttaagcgccatatttccgacactaagcaataacatcgcattaataataatggttaaaaatacaatgccacatgcagctaaataaaagtgctcggagagttttgtaaatttggcaaaaacccagaacaataacagggcaagtgcaatattcattgcactaagtaagcaatgaataaagtccaaagtaatataaggtaccccaatcactaaatagtcggtcggcagggccaataaaataaaaattaaataagtgagtacaccacttgctagaaactttgaaatgttctgtctagttcgatcaagatttaaacaccagaattttttttccagttgtttgggcaaaggcatattggcataacgatgggtatgtagagtgaccaaatactcgatttcttctttagatttgagtaattgatgtacatttcccctattcgccactagtcgattcctacatattctgcattaacaaaatataacattattttttaaagctccctgcgctttattttgccatttgtccgtaattctcgttaccattttcacactttatcgattatcatttgttttatttcgaagtttgaactgccttgaactctattaccctgctccagccagatgattggcatgcacatttacgtgatggtttagcattaaaacgtactgttccagatttggctaaacaattcgcccgtgcgatttgtatgcctaaccttgtaccgcctgtaaaaacagtagaagaagctttagcttatcgcgaacgcattcttgctcatgttccggaaggcaataattttgaccctcgtatggtgctttattttactgaccacacttcaccagatgaagttcgtaaaattaaagaatcagaacatgtaaatgcgattaagctttatcctgctggtgcgaccacaaactccgataatggtgtgagtgatattcgtaaagtttatgcagtcattgagcaattagaagagcatcaagttccgttattgcttcatggtgaagtaactcacaatcatgtagatatttttgatcgtgaaaaacgcttcctagatgaggtattatcacctctattgaaacagttcccgaaacttaaagttgtgcttgagcacatcactaccagtgatgcagcacactttgttttagaacaagaccgtaatgtggcggcaacaatcactccacaacatttattatttaaccgtaatgatatgttggttggtggtattaaaccgcacttttactgtttaccaattttaaaacgtcaaacacatcaaacgactttgcttgaagtggcgacaagcggtaatcctaaatttttcttaggtacagacagcgctcctcatgcacaaaatgcaaaagagaatgcttgtggatgtgcaggctgctatagtgcaccaaatgcaattgagctttatgcacaagcatttgaccaggtcggtaaattagagcgtctagaaggttttgctagccattttggtgcggacttctacggtctaccacgtaatacttctaccattactttggttaaagaagataacctcgttccagaatcttttgattatttagataatcaaaaaatcatcccgctgcatgccgggaaaacgctgcaatggagaaaagtgtgacacaagaaaactctgtcccggtcattggccaacgttttcgtggcttcttacctgttgttgtcgatgttgaaacggcaggttttaatgcccagacagatgcattgctagaaatcgcatgcattccgattgtgtatgatgcgcagggacaatttgtccctggtcctgcatttcatgcacatattaacccttttgaaggggctaacctcgaccgccgttcgctagacttcattggtattgacccattcaacccaatgcgtattgcaatggctgaagatgaaagaactgctttacgtcgcatttttaaatcggtcaatgaagttcgtaaacagcaacattgtactcatgcagtactcgtaggccacaacgcgcattttgaccttgggtttttacaagcggccattgctcgctcaggcacaaaaaaccaaaacccgttccatagtttttcagtgatggatacggtcactttaagtgcagtaatgtttggacaaactgtacttgcaaaagcatgcattcaagctggaattgagtttgatggtaaagaagcacactctgctttatacgatactcaaaagactgctgaactgttttgctatattttgaacaaactgtctccttacctccttgacagtttggtggcggcttcttaagataccgccatcctcaacgtccctatcgtctagaggcctaggacatcgccctttcacggcggtaaccggggttcgaatccccgtagggacgccatattctcttcatataaaatttttctctctaagttctgtcttcttattctttttatatttttctttatttctaaataaaatacacttgtgcaaatatatcactgatccagtatttcctttacatcgttttacaatataataattcttatttttatactgatatttattatcaaaaaggttttaaatggatcttaagcttcgccttctctccctgagtattgcacaactatgctgtattccagctgcttttgcagacacgaacaactcttcaactactcttgcaactatcaaaattaaagcccaacaggcatctgaccagacttataaagtggatagttccagtagtgctacgcgtagtgaaattgcattacaagataccccgcaatctgtgagcatggtaacccaaaaagtaattgaagatattggtgcaactcgcttagttgaagcacttgatttagctggtggcgtgactcgtgctaataactttggtggtcaaggtttaactggttttaacatgcgcgggtttaccagtggtgagttttatcgaaacgggtttccaattaaccgtggctatccaaatgcgccggatagcaacacaattgaacgtgtagacgttttacgtggcccctcttctagcttatatggccgtggtgacccaggcggtacgtttaacttaatttctaaaacaccaaagtctgagcaacaaaccactttaggggcacagctcagtagtgaaggtttatatcgcactaccgtagacacgacaggtactgtacccgatgcagaaaatatcggttatcgcctaaatgtaattgcagaaggtggggatagttaccgtgaccatgtcgaatctaaacgttatggaattgcaccagtcattcaatggcaagctactgatgccaccaaggttacttttgaagccgatattttaagaaaccaacatccactcgaccgtggtcatacacgttatccaacacagaaatcttttaatagctcaccagaaacctatttatgggaaacgggtaaatactacaatcgactctacaatgataacaatatgactcaattacgagttgaacatgaccttgggaatgactggaagctaaatgctggcgtgcaatatttaaatggcaaattgcatggctatgcagtagaagcaaatggcattcaaaatgacggagaaacattagggcgaaattacaattatcgcgaattaaaatggcaagataccgatgcccaaattaatctcacaggtaattttcagcttttaggtttagcccatactttagtgactgggcttgaatatgaaaattatgattataagtcatacattattcgctcaagcggagatatcggtagctaccctattaatatttataatccagttttagggcaacctttacctgagctcaatcgtgtaaccacacatgaccgtgaaaacttaaaaacaacggccctttttgtacaagaccaaatcggcttaaatgagcgtttaagcgcactcttaggcttacgatttgaacattacgagcacgattacaaaaacctattaccaaatactaccaactggaataccagtcatgatgcatttattccacgtttaggcttagtttataaagcaagtgatgacctttcactctatggcaatgctgcaaaatcttttaaaccaaatactggcgccagccgtaacggagaaggttttgatcctgaagaaggtacggcttacgagttaggttttaaatggcaagcacttgataatatgttatcgattgattccgctattttttatgctaataaagaaaatgtattaacattagaccctgttgattcagcttataaagtcgctgctggcgaagttcgtagccgtggcattgagttaaatattgctggtcaaattacaccagcttggaaaattattggtggatatgcttatacagatgcggaagtaactaaagacaatactctgcaaaaaggaacagctctagccaatattccaaaaaatagttttaatcttttaaatatctatgaatttcaagatggccctttacaaggcttaggtctaggcatcaatcaaaaatatattgataaacgtgcaggtcagacagctaatagtacctataccatgaaaggttatgcagttacagatttggtttcttattatcaggcgacaccaaaacttcgtcttaacttagatgtgaagaacatttttgataaagtttatgatgaaagtgctttcaatttatatgcttatccgggtgaatcacgtaccgttcaattaggtatgagctatacgttctaaattgagcataaaggtactatttcatccttagaaatagtacctttactttaagaaatttttacgctgacttacgtgaattcacgcgtccttgaacaacagccttaatattacccttggcataatttaaaaacacgattaaaggtgacagtttaggatttggctttttaccctgcccaatggctttaaattgtgccgcgtaccaaataatttccataattgccattttatcgacaaaaggtaaacctgttttaattggttttacggcgtagcgaacgtcttggcctgcgattaaacggtcagttaaatctgtttcaacagcaagtggacgagcaataccaataaagtcgcatgccccacttgctagagcagcattcatgccttctactgtacggaagccacctgtcaccataagtttacattttacatgctgacggattttttcagcgaagtctaagaaatacgcttcacgtgcaatagtacttgccttacgtttatcagctttggcaccagccattgcaggtgcttcgtaagttccacctgagatttcaattaagtcgatccctgcttcatcaactgctttaaataccgaaatcacatcttcttcgctaataccgccgcgttggaagtcagcagagttgagcttaactgaaataataaaattatcagaagttgcttcacgtactgctttataaacttctagtaaaaagcgagtacggttttcgattgaaccaccccactggtctgtacgtttattggttaatggtgataaaaactggctaattaaatagccatgtgcaccatgtaactgtaccccttcaaaacccgccttttcacaaatacgagcagcagtcgcaaaacgtttaataatatccaaaatttcttcatgcgtaagagcacgtggagtaccaaacatagtcgctaaagctgggctaaaaggaactgccgaaggtgcaactgtttctttatttaggccctttggacactgacgcccagggtgagacaattgaataagttgtaccatcccatattgtttaccgactgctgcccattcttttaaacgctctaggtcacgctcggtttcaatcaccactaccccaggttcgtttttggcctctacattgaccataacatttccagtaatcgcacagcccaaaccacctttggcccatgcactatacaaacctaaatgtaattcattcggctggccttcatagtttgcaagtgcctcactcattgcacctttaataatccggtttttaaatgtggtatttcgaattgtgattggttgtgcaatctggctcatggttaacctcttttaatattttagagcaattactctaatttagatgagttataggtcatgtcaaggggaaatcgataactgacaatagcacatgtcaaatttaaaaaatataaaaaaatgcaactttttgcattaaaaatttaaataaaatttattattataaaatagaatcttattaaatatatttaacaacttgctgcaattaattgcttggtatattcagtttttggggtattaaataactgctcagttggctgatattccacaacttttgcatgtcgtaataccatcactttatgacacagtgctttgaccacatttaaatcatgactaatgaaaatatagctcaagtgctctgtttgttgtaaacgtcgtaataattgaatcatcgctttttgcgtggttcggtctaaggcagacgttggttcatctaaaattaaaagtttaggtcgaactactaaagctcgcgctagagcaacgcgttgacgttgtccacccgaaagctcgtgcggatagcgatgttgaaagccttcagccaactcaacttttatcaaagctgattcaacttgctgtttaatttctttatcagctatcgctttgacttttaacccttcagcaataatctgccctaccgtcatacgtgggtttagactaccaaatggatcttggaaaacaatctgtaagtctgacctgatcttgcgtaaagctttttgttctaagcggtttatatcttgccctagaaagttaatctgtccctcacttttaattaatcgaaccagagccaaagccaatgaagattttccggatccactttcacccacaacgcctaatgcttcgccttgattaagctcaaaatttacattttcaaccgcattggtataaccctgaattcggttaaagaaaccacgtcgtattggatatttaacattgagttgttgaacagataaaattttatgactggttgaatgttgctcagcgaaaccaagatcatgatctaataattgctgggtatagactgaagttgggtgttcaaaaatctgttgaagcttaccttgctctacaacttgtcctttatgtaatacaatcagttcatcagcataacggcgtaccaaatttaaatcatggctaatcaaaatcagtgccataccatatttgctttgcaaggattttaataattctaaaatttgcgtctgtaaaatcacatcaagcgcggtagttggttcatctgcaattaaaattttaggttgaagtgcaagcgcagccgcaatcatcacccgctgtttttgtccacctgaaagctcatgcggataacgttttaaaatgtactctggattagcaattcctacatcttttaataattgaattacctgctgttgagctttcgcttttgacccaccttgtaaaataaaattttcacctacaattttttcaactcgatgtaatgggtttaaagttgtagaaggctcctgaaaaatcatggcaatttggcggccgcgtatgtgtgtttgcgtcttttcgtctatttctaaaatattttttgaatcaataataatacgaccagatgtttttaatttttctggtaataatcccatcatcgccaaacagcttattgttttacctgaaccactctcacctacaattgcaagcgtatctctggcttgtaagtgtaaattgagaccttctaataaaggctgatcttgcgtagagattgaaaggttttctatatttagcaatttagcatctacatttaagttattttcttgggtcaaatgcatcacgtgccgcctccccaatataaattaataatgacaatacaaaagctaagctaaaaaacccagataaagccaaccacggtgcgtctaagttatttttaccttgcaacaacaactctcctaaagaggctgcatctggtggtaagccatagcccaaaaaatcaagtgcggttaaagcaataatattagtggtcaaaataaaaggtaactgcgataggctagaacttatggcatttggcaaaatgtgcttaaagataattgctctatcagttacacctaaagcctgagccgcacgtacatagtcaagttgacgcgcttttaaaaattcggcacggacaattcccacaagtacagtccagctaaagaacagcataataaaaaatagccaatatacatttggggtaaacatgctgaccaaaatcatgaccataaagagcataggtaaaccattccagacttctaccaaccgttgccctaacaaatcgacccagccaccatagtagccttgtatagcacccacaaaaataccaagtagcgctgcacaacctgttaaagccaagccgaaaagtaatgagactctaagcccatagagaatacgtgcaagcacgtctcgcccttggtcatctgtccctaaccagttctgcttagaaggtggcgatggcacaggtacagccaagtctaaattaggagtctggtaagaaaatcttataaggggccaaatagcccagcctttatgattaatgagttcttgtacagcgggatctttataatctgcttctgtttcaaacacgccaccaaaagtggtttcgggatatgttttaaagacaggcaaataataagcgtcctcatatttcactaacaatggtttgtcgttagcaatgagctcagcagccaaggacatcatcaaaatgagactaaacaaaacaaagcttgcccaccctaatttatgttgcctaaacttttgcagtcgtgatcgcacaataaaagacattatttgcctccttgtgcgtcaaagtgaatacgcggatcaatccattgatacagtacatcgcaaataagacgtaaaagcagactaaacaacgtgaagaaaaacaatacgccaaaaataaccggatagtctcgctgaacaattgcttcaaagcccaacaaccccacaccatctaggtgaaaaataatttcaataaaaagatttcccacaaagaaaatgcctgctaaagcttccggcaatccagcaagaaccactaaaatggcattacggaatacatgtttatataagacttgttgactatttaaaccttttgcataagctgccaagacataaggtttattaagctcttctaaaaatgaatatttggttagataagttaggctggcaaaaccacccaacaccatggtaataagcggcaacgtcatgtgccataaatagtccgtaatttttccgaaccaactcaattgataaaaattatctgacactaggttttgtaatggaaaccactgaaaatatgaaccgccagcaaaaaagacaataagtagtataccaaagacaaagctgggtactgcatagcccaccactagcaataaagaagtggaacgatcaaaccatgtaccttgttgtttggcttttttaattccaagtggaattgaaataagataaatcagtaaagtgctccatagcccaagtgaaattgacacaggcattttttcccagagcagctcaaccactgatttatctttaaaaaagctttgtccaaagtctaaagtcaaatagccttttaacatcagtaaaaaacgttctactggaggatggtcaaacctgtattgggctttaatttgctcgaccatttcggggcttaaacctttagcaccttgatagtacatttcagtgcctaatatacgccctgctcctaagccactttctacttcatgaattgcctgttcaactggtccacccggtgcaatttgcacgaccacaaagttgatcaataaaataatgaacaacgttggaatcattaaaagaagtcgctttagaatatatgaacccatataacaggatttcctttaggtacgtgcttttattgttgatgtaaatattgagcaactttcttagcttggtttgcattactccaccaatactctataccggcagagagcacaggtttcactttaggctgctgatacatattccagtacgcataccaataatccccttttccataagtcgggatctggtaatatcctgcacgaagcaatcggtcaagaacatgagtataagtgatttgctgttcacggtctttggcagtgaccagttttgaaatcacctcatcaattaccggattacgaataccagcgtagttatagttgccattttgaactgctgctgcacttccccagaactgagcctgttcattgcccgggtttaaagattgcggcaaattcatcgtagtcatgtcaaagtcataacggcgtgtacgttctaaatattgcggcgcatcaacctgccgtaaattaatattaattcctaatttttttaaatttcttacaaatggcatcagtgttctttgtttgccatcttgctgaatgagaaactcaatttgtacaggtttgccttcgggcgtatataattgcccttctttaattttataacccgcctcaatcagcaactgtctagcaagtaataggttttgccggttaaaaccactggcatctgaagctggatatttccaatcagccaaaacagctttttgcatgattggagaaagctttggcaaaagaggctttaatatggccatttcattgtttgaaggacgacctgtcgctgccaaatcactattttcaaaataactttgtagtctttgatattgtccgtaaaacaaagctttattttgccattcaaaatcataggcataagttaaagcttgtctaaagcggatgtcattgaaaggtttgcgccgtgtgttaaaaacataactctcggttgcaatggggttatgatgtctaaatttatattgcgttatcaagcctgcttttacagccggaaaatgatagtcagtaacccattttttaggattagtttcttcatgcaaggtatattgcccagatttaaaaccttcgaatgcaatatcccaatttcggtaataaacatactttaaatgatcgaagttatagcgccctttattaataggtaagtcttttgcccaataatttggattacgtttataactaatactccgacctgcatcaattttctcaaccacgtaaggccctgaacctataatcgattgcaagctaatacgggtaaaatcgcgtttctgccaatctacttttgagtaaatcggtaaactcgccacaacaaatggcattttaggattatggctggacttaaaagtgaatttaacttgatgtgggtttatcacttctgttttcgctaagtctgcaagatacatttgtagaccaaaattagatttggtttgataggtatcaaagctaaatttcacatcttcagctgttacgggcagtccattactaaatcgagcttttgggtttaaataaaaagtaactgactgggtttttataggatcatacgaaactttttctgccaagagtggatataacacgcccacttcatcaagtgactgggtcattaaagtatcaaaaagataatttaccccttctgtcgcatttcccttaccgttcatactgtttaagttatcaaatgtcccttgcgcagcctgactcaatactccgcctttaggtgcattcgggttggcataaggcatagaagccattgccagatatttaggcttagaatgaattgcgatatacggcgtggtttgctgagcagagaatataacttgcgaaaaaacactgagcccgactagcaggctcagttgagaatataacttttgcataaagtactaattattctataaattaggcactttaatgatatcgccaatacgcaattgagtcgacggtgttaggttgttgagttccgccagtaaagtggtttctaaaccatatttactcgcaagaccaattaaggtatcaccacgtttgactttgtattccactacagtttttggaatcacaatattttgtccacgctgtaaattggcatttgcttttaatgcattcatttcagcaagttcacgaactgaaatacccgcacgactcgcaatagcatttagcgactcaccagctttaaccgtatacttttcagtatttttccctgcaactacagcttttggagacgatttcgccgtatccgttttagctgtttctactgttggtaaatcacctgttaattttaagcgttgaccaacacgaacattactgttgcgagacaaaccgttcaatgcagcaagataatctaactgtaaatgatagcggttggcgatatttcctaggctatcaccagatttaactgtgtaggtctctggcgtttcttctttggtatttttagccgaaactttgctagttgtttcaacttcaccagttaattttaaacgctgaccagcacgaaggcctgcagtacgtgacaagccattcaaatcagccaaataactagtttgtaagttatatttagctgcaattgcatttaagctatcgcctgactgcacaacatattggtcaggaactgatgcaccagccggaacttttagagtttgtcccagttggacatgactgttggcttttaagttgttcagttcagcaagctcagctaggctaattttagacttggtcgcaatgcttgataatgtgtcgccacgctgtactttataactttcagttttatatgatggacctgctgcaagcttttcatatttaccagaagccttgctgtcatcaacttcatcaacagtgatttcttttgcaggtacattaattttttggcctacaattaaattactaccagctgataaccctggtgttaggtctgccaactcttgattagataatgcataacggtctgcaattaatttcaagtattcgccacgtttaaccgtataactctttgttgcaatacgacgtgtacttgcttgaattgcctttggctctactttagcagcacgattacctttaggttcttttaactgtaatttttgccctacaaacaagccatctgttacagacaaatcgttatattcagctagctgtttcactgacaaattaaattgatttgccactcctgttaaactgtcatttgcttgaacaacatagacatcaggtttagctgccgattttgccgtagtttccacctcttgaggcttagcatcatagagatatagactggttcctacaaataaagtcttttcagggtcaatctggttccatttagctacatcacgccagttcacaccattcttcatggcaataactgctaaagtatcgcccggttgtactgtataagtactacgcttacctttaggttgtacaaccacaacatctgtatcagtcttgatataaggcttatctttattgcgctgagcatcttcagagtttgcaagagttgcatcttcagctaaagtttttggataagcaaaacctttacttacttctttaccttgctgctcagcaacagattggctggtctgaattgcggttaacttaattttgccgtcatacggatcgacaatttctgtaccctgaggtgcaagtgcttttaactcggcaacaacttgatctttttcagcttgagtagcttgaggctctaaagcttgatcaactgtttccttttccccttcagcacgcactgccgctaaaattttctcgcgttcagttgctgaaattggcggttccgttctcacaggtttgatatttgcagccggagtgaccgcaacaggaatacgtggtgcacttggtacatcagctgacgctgcaaaagcagctagcgcatcagaaccacgaggtgttgcagtttttaccgttaccgagctgctacttgttttagcaggtgtcgatggtcttactggctgagctggagttgatggagtagttctaactgtgactgaagttgaagtcgttgtggtcggtttagacggcgaagtaacacttgcccaccagcctgaacttccacctgctttcattccttttaatttgttatccactgaaggacttatatcagctggaatcaaaatacgcattggacttgcagggtctactgtttcaccacgatagcctgggtttaatgcatataactcagcacgactaagacccgtcaccgacgcgatttcatttaaagataatggtgcagataaggtaacttcacggaaatggggtctgtttgcaatcggaggtaacgaaaccccataagcgcgtgggtttttaataatttgtgcaacagccaagaaacgcggaacatagttcatggtttcttgcggtaattttagtgaccaatagtctgttggcaaaccagcagcctgatttcggttaatcgcctgttgaatacgacccggaccagcgttataagcagccaaagctaattcccatgaaccgaactggttatataagcttcctaaaaactcataggcagcacgtgtagattccacaacatcacggcgtccgtcgtacatacccgtttgttgtaaaccataaatacgaccagtactaggaataaattgccataaacccgccgccgccgcactacttgttgcagctgggtcatatgaactttcaatcactggtaataatgcaagttcggttggaagaccacggcgttctgcttctttaacagtatgatataaataacgacttgcgcgagcacttaagcggtcaaggtagggctgacgtgagataaaccaactacgctgcgcttcaatacgtggatcccaatgattgaggtccattttgaagcctacggccatacgcttccagacatcaccgtgttttaaaataagtaaacggtcaccctctacagcacgcatatctgttgctgaaagtaagtcttctaaagagtccagactgcttgcatcaagatagcctgctccactcacctgttttgttttcgaggtttttgcagattgcggagtcgaagaacagcctgttgtaatacccaacgcagctaaagcagagctaaggactgtaattttgaataatgatgctgcagatggctgccacacaaatgtggttggtttatacataaaaacttccaaacaactcgcgtaatatttcttggggtctgcccacaaaccctaggtcttcgatgccattgtagtaaagcatgcaagatagacaaggcaataatttaatgtcatttgcatggaaatgttacaagaaattaaaaaaagcttgctttgtaacgatggaaccgaactttttgcgtatacaatacaccaaattcagctctttttctttcagtttaggtttcgatttatgtctcaaacaatcacactgtatgttgatggtgcatgtcgtggcaatccgggtttaggcggttggggtgcatatgtcattaccgaacagggtgaacataaattatttggcggtgaacccgacacaacaaataaccgtatggaacttactgcggctattgaaggaatctctttttgccctcctgatgctcaattaattgtctggacagactcaaattatgtgaagcaaggtattacagaatggattcatggttggaaaaagaaaaactggaaagatgttaaaaatcctgacctatggcaaaaactcgatgccgtttgtgcgggtagaaatattgaatggaactggattaaaggccatgcaggacatgcaggtaatgaaatggctgaccaacttgcgaatttaggtgcagacaaaactgctcaagaacttaagcaaccacagtcagccactgtatcgcaagatataaaaaagcctgaacaagactggttactagacgatcctttcggattcgatctggttgaaacaaccgaagatgaaacggtcactttagagcagacacaagaagttgagatgattgttgtggatgaagaaatgaatgtagttgaggctgtagaacaagaagaacaacagcaaaataccaatattcatccacaaattgtgatgactgaagccaagcttaaattacaaggcccaagacaactcatactcgatacggaaacaactggtttctatttccaagatggtgaccgcattattgaagtcggtgccatcgaaatgattaaccgtaagcttacgggtagttcgattcacatttatattaatcctgaaaaaccagtgggtgactctgttcaagtccacggtattactgatgagtttttggtcgacaaaccaaaatatgcagaaattgcagataccttatttgaatacctaaaaggcgcagaaattattgcccataacgcaaccttcgatatgaacttcttagatatggagtttaagcgtgttgggttacctgctctttcagaagtttgtgaagttaccgatactttagctttagcgaaaaataagcatcctgggcagaaaaactcacttgatgccttagttagacgttatgaaattccagcgcgtgaccgtactttccacggcgcattactcgatgctgaaattctttctgatgtttacttggcaatgacaggtggtcaagtttcctttgatatggatgccctatcgcaaagtgaaagtgaccagcaaaaaacgaccaaagctagagttcaaattgaattacctgttatttacccttcagatgaagagctaaacatacatgagacttgggtcaaagaatttgagaaaaaacatggagaaccttgcctttttgcaaaataaatttttgattctctaatgtttttttagtttccccttttgcaagttaagttatattagtcgtatagatttttagctcaaactattgagccatgacgaatataacaattgattttttttgcaaaggggaattttttatgtctgagcataattcgattcaatttgatccaacagcgttactcatcattaaaaatgaaattgataattcaataaaactggtggaaggcgctgtaagtaccttaattgaagaacaggctctcccttttggtattgatgatgcattagaacaatttaaacaatgtactcaagtcttacgtctcattgatattccgtatttggcaaaaatcactcaatattcaaccgagttgatgcaaaagattatggcgaatccagagcgcatcaataccgatgacgttgttgctttaagtgaaggcacaaccatggttaaacgttatattgagttcatctgtttacgtgaagtcgaagtacctcagtttcttttagacaccttaaataatttagaaaaagctttaaataagccactaacctcttctggacaacagattgcatcaaagctttcaacagcttcacttgagttaccgttacccgaagtgcttattaatgaaagaactcagtttatccatcagctttataaattatcactacatcaatttttaaataaaactgaaaatgctcgagactttcaagcatttaaactgattggcggttatttagtgagtatggctcaaggtcaaccaagccagcaatactggcaattggtgaactctgcctttagtcatattgatgaacttgttttaaatgatgctcgcctacgtgtgttcattaaccttgaaaatgccataagtttatttttagcttcacctgaaggctttgaagcaaacttaactgctctagcagatatcctgagtattgtgattggacaagaagaccaacttgcgcagcaaatccgtagtcagttaaacattggtcatgagtttctcaccgacactcaacttaaagcactgagccaacacttgtatggtccagactttgataccatgcaaacggtaagtcaattaatcttaagcgaaatgaataaagttcgtaatgatattgaatataactaccaaaacatgtcaccagaaaaagctcagcaactacaaagcaatcttatgcagcttgctcatacttttaaattactcaacttaaatgaagctgcttcagagctttctcaacaagccagcagtttaagccaaatcaatatattgagtaatgaaaactatgctcagcagttgatgaaaagcattttatctgccatgaatgccattggtattttggtgcgccattattcatctaaccgtctacaaattcgtgtgaacaataccaatatctctctagatcgtttagatgaagcacatcagacattattgaatgagaccaaaaatttaatcgattttgtatgccaaagtttgactctctatgccaacgatcaaactcaaaatattgaagcaattgcaggctctttaaaagagttggctggcgcggctgaatttttaggaagtacagttcaacaaaatgctttacttgaaactgccaagtttgtacaacagcaaatcgatcaaaatcagcctttcaatcatgatcagattcactgtatttttaacgttttagctgggctagatatgttagttgacaatttaaaaaataaacagcctgttctacaatccatgtttgatgtagcattgctaagtagtcaacaacttcaaaaaaaggcagcttaatgtctgagttatcacttgcttatatttttcatcatcaacaattattggttgaccaaaaccttcaattacccaaagtcgaaaagttagcaagtgatctgcttttcactcatgatgaacaggtcattgcacgtgacctgttgagtgaagaagccattccggaaggcctgcaactcgttccaattcgtcaacttatttccaactggtcaaaagaacaatttttacaggcaagtcgtgctgtacagttgctcgaatggcgacgtaatcacaagttttgtagtcactgtgggcatgctaccgaagtacaccctacagaatatgctatggtgtgcccttcttgtcgctaccaccaatatccgcgtgtaaacccatgtattatcaccatcattactaaaggcgatgatgaaattttattggcgaaatctattcacaataaaaccaatatgtatggcttgatcgcaggatttgtagaagttggggaaacgcttgaagaagctgttcagcgcgaagctttagaagaagtgggacttaaactcaaaaatatccaatatatgtcaagccaaccttggccttttccaagcaatctcatgattgcatttagagctgaatatgagtcaggtgaaatttctttgcaagaagatgaaattgccgatgcacaattctttaaatttgatcagttacctgaaattccatttaaaggcagtattgcacacgcaatgattacgcagattactcaagcgaagtaatctgcgctctcgaactgatgttttaaaatacttcatccagaaagtgcaaaatggtccgtttagttcggaagtaatgacttacaaaactcgataaactagccaaaattgtaatatgacctgttttaggaatcacagcgatatgactgtgatttccgctttgcctaagtgcctgatcaagatcaaaggtattttctttttttacaagctgatcattttcagccatgagcagataatgcttaatatgattttgatttacaaaataatatggcatcacttctttataagaaataccttgatcaaaagcatcttcggcaagcggatcacctttataatcaaaatgataaggacctgccaaaccaaaaattgctttaatattacctaaacactgaattgtatttggttttgggtgataaacagcagacatcacattaaatgcacctgccgaatgtcccataagcacaatattctctgtcgagatttccaatttttcttggttctggtgtaaatagtttaacgcttgtgttaagtcatctacataacttggaaaaatattcttcggtgcgagctgatagttaatgacagcaacgtcataaccttctttcgtaaacgcttcacctataaataaatagtctcgtttattaccatgttgccaagcaccaccatgtacaaaaacaatgagtggtcgatgagctaagcgcttagtagaacgataaatatctagacgatggcgaggctttaagccataacgcacatttaaaacctgctcaaaaccatcttttggtgtaaaacggtttaaagcaaagctccctaaatcatacagacggaactctttataaagagttctcgcctgctcaattttgctttgtaattgttcaatcaggttcatattttattgtgcagaagatgctggatctgtttggtccggatcaattgcaacaggagtttgaactgttggttgagcaagaacgttattaattactggtgtagttgttgcactggcagtactcgctgccggagcaggcgctaaatcaatattatcaatgagcgttacaatcttagtcacgttaccgacattttgaagcacattgtttaagtcattaatttcagctgtgtttaaacgacccatcacatataaaacaccatcttcggtatgaaccagtactttactgtccgatactactggcgctttcattaataaagcacgtgtatttgcagttaccccagcatcttgcataatcgtgttatagcttactttgttacccaccgtaatatagttatgtacggctttcacatcactcatggccttaacgttgtcttctgccaactgttttaagtatgggtctggcacctgtccagttaacaatactgtgctatggaagctttcgatgttaatacgagattgtttaaaacgctgatcaagcttatagaggttaatattcgctgtacgcttaattgaagaatcaataaatacttggcctaagctacgtacaccactatctgttccaactggagctgtacctgttccaccagaaataaaacttgcgcaacctgacaaacttgcgacacaaagcgctgttacagcaatacgtttcaacactccaccagactcctatcaatctcttcttggcttgatcataaaacatcggtctttaatttgctcaaaagagtaatgaactcttaatccaaagtaaatgcattttcgatccattgcagatcataatggaatttcgaaaagtcttgctgtactgtttttgcaattttctgtggaaaatcaaaacaaatcacatcaaaacgacaataaaaatcctgataagatgggtagcgctgtaaaaacctcatcgccgtcttaattatttttttctgtttgctcaaggtcaccatttcacaagcttgaccataatttccctgccctcgcgcttttacctcaacaaaaatcaattcgttaccgcgttttacaatcagatcgacctctccacggcgtgaatgataattactggcgacccattcataattttgttcttttaaaagttttagtgctgtttgttccgcccattggcccaactgctgtgcaactaacataatttttttgtttccccaattaaaaatgtaaatactgttaatgtcggttctatacctttttatttttgaattgaataaatcaaaagcagatgtttcgaaaaataaaaagcctactgacattgttcacgccaaaaacataatttcgggtacactaacccattaaaattgtttatctgtacggagtaaaaaccaaatgagtgctcagttatttgttgtagccacccctatcgggcacttagatgatatgactttccgtgcaattgatatcttaaaatcagtttctgttgttgctgccgaagatacacgccaatcagctcaattattcaaacactataatatatctaccccacttaccgcatgccacgaccataatgaaagcaacaaaattgagcagttagttcaaaagctacttgctggtgaaaatattgctttgattagtgatgcaggcacaccacttattagtgaccctgggtttaaactggtccgtgctgctcaagaacatggtattagggttgtacctgtaccgggtgcatgtgctgcaattgcggcgttaagtgctgtgggcttaccaagtgaccgctttagttttgaaggttttttaccatcaaaagcttctcaacgtattacgcaacttgaaaagcttaaaaatgaaactcaaaccttaattttctatgaagcaccacaccgtattttagaatgcgtaaaaaatatggctgaagtatttggtgaaaaccgccctgtgggtttcgcacgtgaaattaccaaaacttttgaaaccatcaaaaaaatgactttaaaagatttggttagttttattgaaaatgaccataaccaagaaaaaggtgaaattgtccttgtggttggtggtgcagcagaaaaaaccgatctggaacaagaaaaactagatgaacttttaaagcgcttacttcaagatctatcagttaaagcagcatctcaactggctgctgatttaacgggtattaagaaaaaagtcgcttatcaacgtgcgcttgagttaacacaatcttaatttattaactaaacggtgatgaccaatgcctatgtcatcaccgcgcataaattttgcataaaaatattaaagataaaaaataagagtattgatatgactgaatcacttggaaaacttggcccgcatgaaggacaagaactagaattattactttcaggcaaaaaacctatcgcttatttttatgagttattacccattgaatttataaagcatcttgaacaagggtctttatctatgctcagtaaagacattgaaacctctctacctttccccttttcaattatgctgatctataaagatgcgtctttagcagatttgaatgaactcatgttatgtattgaaaggtcattaaaagcaactcaacttgaagagcgcctagaactcgaccgtagaatcggacaacttttaggttactcaacacaagatatagagttttatattcaacacatttcaaatcgacatttaaaaactaagatctaaaattatctcaatatctgttttgctgattcaacaatggtctcagtcagtacatcaagttgtttcgactgtcttttccagtgatgccaatataaaggaacatcaagttgagcctcaggcataatatcaacaagtattccattttcgagtaatggttgaacctgaagttcgggcaccatgccataacctaaacctagttgaattgctttcacaaaggcatctgtcgccggaataaaactataaggataactctgcattggtaaaccgtatccttttaataaaacctctgaatgcattaaatctttatggttaaaaataaccgccggtgtttttcttaaaacttctcggttaactccaccactaaaccaccgatttacaaactcggccgatgccagcattttatagcgcattttaccaagaggctgagctaagcaacccgccatcacctgctcttctgctgtaatacatgcattgacctgacccgtttctagcaaagtatgcgtatgtgattgatcatcaatttttagctctaatactattttttctttaaaaagtgtttgctgaatactgggtaaaagccaagttgccaatgagtctgcatttgaagccaacgcaattttataaaattctgattcagaagatttgcccattaaaccttgtaaaagattttgctccattaaccttgtatgacgtaaatgctggagtaaagtttgccctgcttgtgtaagcacacatggacggccacgtattattaaaatctgccctaaatatttttctagggcttgtacacgtagtgatacagcagagggagttatacataaatgctctcctgctgcatcaaaacttccgacttctgcaaccgccagaaaagcttcacactgcttactatccaacatacaaaacctaaattatttttagccaaacctaaatattcttaattttacttatttcttaataaaaagtcagataattctcccatctgatttttttctgcttaatggttatgctttctctgagtgtgttttttaaaggtttaggtattggtagcggcctaattgtagcgattggcgcccaaaatgcttttgttctaaaacaaggacttaaacagcaatatgtattttggctatgtttaatttgtgccctatccgattcaattttaatcgcctgtggtgtattaggttttgccgaaattatgacagcatcacccatcttaatcacagtcgctaaatatttaggggcaacgttcttattcgtctacggtgcaaaagccttctatgccgcgtttaaaactaaccaaggcatggagcttgatagcagccaaaagcagactttaacccaagcacttataacctgtcttgcctttacttggctgaatccacatgtttatttagataccattgtactgattggttcggttgcgacacagctagaagataaaatcagttttgccttaggtagcattcttgcctcttggatcttctttttcagtctaggctatggtgcaagatttctaaaaccattatttatcaatccaaaagcttggaaaattttagatttcatgattggttgcgttatgtggagtatcgcaatatcacttctcatctaatgcattcaaaaacaaaaaaagtaccatgcttacatggtacttttttatgcaatcaaaattaagcttctgaacccaacattaactttgattgttttctttcttgtaatgattgcttaatcacagcataacccgaagatacacctaaatatgcgataacaaaggctacgaataaatccggaaatatagtgcctgttccaaacacgcctacagctgccaaaacaacagcaatattggcgatagaatcatttcgactacacaaccagacagagcgcatattggcatcaccatcgcggaatgcataaagcattaaagcaacagaaacgttagcaattaaagcgattaccccaattgctcccatgaccatcggttcaggtgaaacaccatgaaaaaatgaccaaacgacttttgcaataacgaagaacccaaaagcagccatcgttatacccttaacaagtgctgcggttgcacgccagtaaaggctcatcgaaagcacgactaaagacagagcataatttgcagcatctccggcaaaatctaatgcatctgcccataatgaaacagattgggctttataaccgccgactatttcaacgacaaacatgagtgcattaattacaagtgcaatccataacgcttttctaaagcgcgggcttgctttctttgtaggagagcaggttgaagcacatccacatccagccattttatttcctcaaaaactcttttatagtgattaaaaacccttgagtagctccagagtcaagtcttatgagtctttctattggtcaattatcaaaaaaagcagatgtcccgatcgatactattcgttattacgaaaaagtaggtgtgttggaccgcattcagcgctcagaaaataattatcgtgtttacacagatcaaacacttgcagacctattatttattaaacattgccgtgaattagatatttctctcagtgatattaaaacgctaaaagaaatgaaagctcagccgaaacgggcttgtacggaagtcgataacttggtgaataaatacttgatagaagtatcggaaaagattgagcgactgttgcttttaaaagaaaccctaatcgatttaaaacaacactgctctaccgaccgtacagtagatgaatgcggcattttaaaagaactacaaaaccatccttaaatcatcataaaacgggcaataaaaaagcatcactcaagtgatgcttttttaatattaacgatcgctatgttcatctggtggaacttctgtgattcttccgccacgagctaaaaacgcagcgacttcatcttccaacgcttggcgttgtttttgtttcgcagttacggtaagcgtttctgcttctgcaagatcggcatcagttaagttgcctgcttcttcatcagctgcgccactttcagccgctttggcttcatcttcatctacagcagaatcttctgcatcttcataatcattgatatctgtcatttttacactccccacaatgatttgtattgcatcatcgctatggtcttcgagacctcagaaatttagcaatctctttgcatttagcaaagagccaaattggtcaaatccgtatcttttctgaccgaattggtaatgatatataaatgattgtttaaaaaatatctactgatatttatttagatcagtagagcataaacttcgtaattattttaacgactatactgggtgttttgtaaagcccctaaaccatttgcttgttgcataaaactctcttttaagaacgaaatttgttcaacttgcttgagtcccacgttccgagcccaaatcaatggaaatagctcactgctttctagccaaccaattgccgacatactatgcatcatcgcatcattttgtcctttacggcggtgttcataacgcattaaggtttgttcatgtgcccatacgccacggcctaaatcatgcaatagtgcatcacagagtatcgctgcatctaaacaaccaatattcaccccttgtccagcaagtggatgaatcacatgagctgcatcaccgattagggctagaccagctttaacgtattgttttgcagcgcgcgctttcaatggaaattgtgctcttgaacgaacatctaacacttcacccaacatatgttggctttctcgagttaaaagctgcataaactcgctatcacttaaagccgaatattcatcggtataatcatctggcagtgtccagacaatggactgccaataaccgttttcactttcttcaagactcgccatcggcaaatatgccaaaggtccagtaggcaaaaagatttgccgagcaacataatgatgaggcttagacgtttttatcgcacagctaatcgctgcttgtttgtaatctagtacatctagatcaataaaggcttgctcacgtacaaatgaattggcgccatcagcaccaataagcagtttagttttaagtgccgtgccatctgccaattgaatatgccagcacccgacaccttgttcaatacgggtaacacgaacttgagtacgatagtctgttaactgctcaagcattttttgttgaatagcaacattcaatacacttggctcaaccatagaacccaaggcttgctctggcattggtctttgtacagactcatggccaaaattaatttcaccatagccatttaaattccacacttgcatgccggtataaggcatttgacgtgccagatcatcccaaacattgactgctttaagtaaatgaatcgtcgcttggctaagtgctaaaacacgtggattcatcacgcttaatgttttttcaacatcaagtacaggggcagcatcaagcacggtaggctgtacaccaccttgtgcaagtaataaagcagttaagccaccaactagtccaccaccaacaatgacgacatctaacacttcactcatgcttttaaccccattgcatagtttgctaccagtggcttaacacccggaatgacatcaaatgcaattaatccagtattacggattaattttaataatgggttttggttactaaagccccgaactacggtatcgcagaatttaattactcgctgctggtcagataaacgggcttgttcataggcaagtaaattatctgggttaccaatatcatcagatgcgcttaactggttcactaaataacgcagcaatacatctgcatcacgcagacataaattaaaaccttgcccagcaacaggatggattgtatgcgctgcattacccattaaaataacgcgtccaaccgcttgtttatgcgcaagcacttgtgaaagcggataactaaagcgtttacccgttttttcaaatttacccgctctgtcaccataagttttttgcaaggcatctaaaaagtgttggtcgttttcttcgcccaaccactcaccttcagtgccttttttaacaggccataccactgagcgacggtattcacccggtaatggcaacaaagctaaaggccctaatgcactaaaacgttcaaaccctacatgctcatgcggttttgaagtctgaacagtcgtaacgatcgcaacctgatcatagtcgtggacatcgacaccaacgccgatagcctgacgacagaaagagtcacgtccatctgcggcaattaatagctttgactcaagttttaaaacttcatcaccacgcttggcttcaatatgtacttgttcagtatcttgagttaaagcagtaacctgtacgccatcaatcagctcaatcaaaggctgctgacgtacttgagtcaataaaacacgacccagccaagcattttcaatcacctgtccaaagctttcgactttttcttgttctgcaattaagcgcgccttaccaaaactgccttgttcagtaatgtgaacttgtaggattggagtcgcgtgttgctgtaatgcatcccataaccccagcttctgataaatctgtacactacgacgcgataaagccgtattacgcgcatcaaaactggaatgataaggggcaacattttgatcatcatagtttgggtatttcacagcttctaacagctttactgcaatattagccttcgccagcatgagcgaaaggctaagtccaaccattcccccacctacaataatcacttgttgttgcatcgagttgtgctcctttggcgaatacgtttaattatgatttagcttgcgccattaaatgttcaatatctgcaatatttttaaccacatcagcagttaaaactcgtggtcctttcgaggttgcgaccacatcatcttcaatacgaataccaataccacgccattttttatctacactttcatcgtctggtgcaatgtataggcctggttcaacggtaacgaccataccttcttcatattgacgccagtcttcaccttttttgtaagacccgacatcatgtacatccattcctaaccaatgacctgtaccatgcatataaaattgacggtatgcttcggtttcgataagttcgttaatatccccgttgagcagacctaaatccactaagccttcggttaaaattttaactgctacttcatgaggctcacggtacgaattaccaatgcgtactgcatcaattgccgcatattgagaagccaaaacaacttcatataatgctttttgctcagcactaaatttaccattgaccggaaaagtacgggtaatatctgatgcatagaactcatattcacatgcagcatcaattaagactaaatcaccgtctttaagaggttggttattttcaacatagtgcaaaatacaggcattagccccaccaccaacaatactgttgtaagaaggcacacagccgttttgcccaaatatataattgagctcggcttctagtgcatattccatcatgccagggcgaacagtttgcattgcacgagtatgtgcctgagcactaattgttgaagcaatttgcatcagctcaagttcttgtggtgacttgattaaccgcatttcatcgacaatacggtcgagctgtaccagttgagctggagcactttgatgccgatgctcagcatctgcttttttaatccactggctcactcgtgcatcaaacgcagcattgtgtccgattcgataataaagacgctctttatttaataatttttcaataatttcttcatcaagcagatcaattgcataagcctcgtctgcatcatagtcttcaatcgcgccatcaattccagcacggtaaccattccagatttccatctcgcggttacgttcacgacaaaaaagactataactatagtcagttacatcctcaaaggtttcaataactgcaactgcttcaggctcagcaaagcccgtcaaatagaaaaaactactatcggcacggaatttataatccgcatcacgattacggtacatctcctcacgcgttgcaataattgcaatactgttaggacccattttttctgccagacggtctctacgatgttgaaaatcagcttgaggcaatttcataatgatctacttgatttagaattttaaagtcaaaaaataaaatacaaccaataacacatcgcctcaattagcttgggcgatgtggtgtaaacatttcaacaatattctgatctgtacctagagcagcagttttactttttgcatgaaagtttttcaataaagaactttcagctacagtgattttttttctgccaatagacaagcttacaggaattaagcgtacaaattcatacaattcttcgtaactgctttcgccttcctcatcattgtcagaatcttcaaattcgactgctgcaacatcttgaaggtgttcaatcaattcgcgctcatcaccacgcacatgaccagatgctaaaccgaaacctaatacaacacccgcacaccaatcagataatgcttgcacacgttcttgaagtagatgttcatcgtctggaagcattggtagataatctaattcatcttccgataaagcatgaactacatcttctgcttcgtcagttaaaagcgctaaagcatcttcacttaactctggcacattaagggttgttaaaatttgtgaccattctgcacgcgtaggcgcttctgtcacacaaacaatacctgttaacagaccatgtaactcactagggcttgaaatttcttcaattccttcaaaatgagcgttccaatctgtccagcctgaaatatcgtcttgcattcgtttatccaatctctatactttgtatatattacctttgattgcaattctgtgcgacctcgttatgttagaacaattacagcgtctacaagcgcatattggcgttttaaaaacacgcttacatcatctagagagtgaaaattctgctctctcggaagctaaagaactggctgaaacagagcatcacgcacaagttgtgcaaaaaaatagcatcatcactaaaaaacaagaggaaattgagacgttaactgagcaactcactcagttacaaggccaatttcaacaattgaatcaagatgctaacacacttgcagagcgttacagccgcctagaaaaaagtacgaccgatttaaaaaatcgttttcaggaaattttggcagagcgtaatgaattacgcgtgaccaaagaaaaacttcagtcacagcaacgtcaaactcaacaagagttacacgacttgcagcaagatcgtgaccgtttgttacaaaaaaatgaacttgctaaagcaaaagttgaagccatcattcaacgtttagcaattttaggtactgctcaagatcaacatgcgcaagaaattcagcaacttgctcatccaaatgctgaagctggtgaggagacacaatcatgagtgaacaagtcatggtagagcttcggctgattgaacaaacttttaggcttgcaacgacttctgataaaagagaagagcttgaacgtgcagctgagcttctcaatgaaaaattcaacgatatgcgccgtagtgcacctcgtgttgagcataataaacttgtcattatggttgctctacagcttacccaagaagtgttaagccttaataaatctttgcaagaatatacgcattgtgaacgtctattacaggctattttggaagatgttgaacaaatagtgtaaacaattcgcataaagcttcatcaaacgcaaagtaagtttacagttcgataggctcagatgattgccaacgaagccagatcagttatactaaagctgtctctgggatgttcgccagccggtctgattcccctgagccgatatcatctctttaggatggtgttctgcatatttagagcgtatgcctaccccgagtaggaaacccagcaagtatgcgtcacctccaccttgaactttagggttcaagggtaacgacatgcagcggcatcttcggagcatctaatttaacttattaaacaacaacttataataatataaaaactatcaattcccttccaaacatcaatattctgaataatgtagccgctatgtagccactagaattgttgcttaatgttgtttattatcgcctaatcaagtcattaataatttgttgaatatgtccgttaataaacaaaccttaacaaaatcttttgttgattcactccccttcacggcggcaggtgaacaggttttttataaggatgacaaattaactgggtttgctttacgcgtaacgaaaagttctaaaagctatattgcggaaaaaaaattaccaactggtgagacatgtcgtgtgactatcggcaagcatggtatttggacagtccagcaagcacgcgaaaaagcccaagaatacttgttaatgatctcaaaaggtatcaatcccaacaaagataaacgagatagtaaaaatcagcttcttgcagaaaagcaggacctaaaactaataccaaccgttaaagaagcatatgaaagttataaggctaaaaaagacttaagcgccacaacacttgatgcatatgatcgatgtgtaaatgattactttgaagattggcaaaatttaaaaattaaccaaataacaagtaaagctgttatggatcgccatacagttttatcagaaagaagtagagctcaggcaaatttggcaatgaaatttttctctgctctatataatttcacgcttaaaaccacagttgatagtagtaataataagctgattacagaacccaaccctgtactaacaatttacgaaactaagacttggaataaaattaaacgtagaaaaaactatattagatctgaacagcttcatgactgggcggagggagttgccagacaatattggccgggaaatcaaaatgacaaccatctcgcttataccaatcaagattttttatttcttttagtattaactggctttagacgaaatgagggtgagggtctggagtggtcaaaaattgatttgaagtatggcactgttcttataacagataccaaaaatggtgaggaactgttattaccagttggggaaatgctgtggcatattttaagagagagaagaaagatgaatccggatgggaaatatgtgtttccggactttcggaacaagtcgcatattatagataaacgtcatgctcgtgaagctgtgactgaaagcactggtattgagttcacttttcatgatttacgccgtactttcagtacaatcgccaatagcttggctataggtagttatacaattaagcgcctaatcaaccacacaaccgaagatgatagtcaagatgtgacagacggctacgtacaagtaagttttgaggatttgcgaaaagcaatgaatatgattgaaaaagtcatcatttcagatgtggcaaaagagttgattctaaatagaatttatttccctaaaaacactcgagatttagagaaaaagtttaaaaatcataatgagttgattgttcaggcggctaaagctcaactttagatggtaattcccaacggcgtctattaaatgtcacggttccatcaatgttgattggtaattgattaccgttgtagtcgaaaacctttatgactttaccgcctttgtttacctcagcaagcaaattacatgtgtgctcaagctttccaacttctgtgaccataatcattaattgctgcatgataaaacctcgagagaatacagttgagaataattttgctcaaaatgtgcaattatccagattattgagcaaataattgcacactaaaaagtcattactcaagagccttcacaagcgcaccgtgtcttgctttgcagtcattatattttgcaactgtatcaactgaccagatcattaagtctttgccagttgttcctgccaattcatttagatttgggcatggttgaataagattagctggtattaccggctttaatgagttcattgagttgctgcatcccagcatcgtcaacacagctagacttataaacaggacgctccacgatcttttgcacttcacgtgtaactgtttcgactttagtgctttgctctgctttagctttttcatagtctgcgctcactttattgatctgattttgcttttctgcaagagctttcaaattcttgcgctcaatctcttggatctgagattgacacttttgttcagcttcttttagctgaccagttttgtaattgagtacggccaaagatatggccaataaaaaagcgagaaacacaataatgatttctcgccaatatttagcagcaaatacaatccacatcactgcgctcctatacattttgcgtgtcgttctacttgtctggtccagacgccataacacccgtttttacgaacagagcaatcgcgctttgcaacgtacttatatttaagtaaagagtcgcaagctgctttatattgaccagcctttaaatgcttaagcattgatgattttgcgaatgttggcacaccgtattgatacgtgaaatcaaggtataggtcatattcagtttgtgataatttcacgcccttcaatgaatctttaaacgcgacttcacgcttggccacatcatttcgcaaccacttatctgcggtcgcacgtgtaattggtggatctgtcatttttactggtgagccatcgggtttaaatgtagaaccatggccctgtgttggccgatcccctttaacgggaattactggctttgatgtaaacccttcatcgttttttacgcccacaaaaaaagcagccgaagctgctaagactgctgcaatatatttagtcttgcttgacattacagtcacctttattttccaagctttctaaataggctttaagtgcaatttcatcgcgcttatttttctttctggcgtagtaccagttcattaaaaaaccagctaaaccaatgatgatactgacccaaaatgctaaatcgattgacccgatccacgccgaaactgctcctgccacacttcccccgtatgttgcacccttactggccgccaaagcggtcgatgtatctataatttgctgattgtctgccatgcagccccctaatttcggcaataaaaaagccctaacttattaaaagctagggcttgtaaggtttttctatgtagttacgcttttttaattacaagcttatatcgactaccaataaaatcgggatcatcttcaattgatacttccgtattgaagcctttttcacgaagtagatctgaaatggccgttgttgtttcttcatttaaagtcatctttgaataaagagtacatactccgttttgtgcaatgtctgcctcaatctttggcagtgcaccctgtacatacatatctgcgtagttcatattaaattcctgattctagtgtgaatgatactgagaagcgcattggatcaactaacgcacctgtcaaatctgtaaaaaacaacttgactccagctgcaactttgaaagacgaccaactcccactgtatgcttcaattgcttgtagcgtcggtggcaatatagcctttccaccacctaatcccgttccagaaaaaatgccagaaacaaaaatgtgcggatttgctaattcagttgttacgcccgcatctcgttgcaatctatagactcccgtagactcttttgagatagaccagcctgcgttattttgttgggtagtaaagttgacatcataagtcagcatcatcggtgcaataaaacgcccgacttttgatacttcgtgattgtaagtattccactttcgaatttttttagtccacgagtctgacgcaatataaggtgtatttgtagcagtagcgccaattactcgcttaaatactacacttgcaactgatgtttcatcctgatttccaaaatacaattcgctattcggtgcattgatgtggattggtgttttatacccagaatctgccgcagtcggttgagtagtaattaataatcttcgattagtaccaccataccaattagcaaaaagtgttgctaaaccagatggagaaagttgtattttcgcacccgtcgcaccgcttaaagtaattcgacttttatcaattacaacccccccaatattatctgatacagccaaagcggttgtgtcagctcgatttagccaaggcgttctaatgtagagattattaactgtgcaattaaatgtttgttgataggtcgtgtttacaagccagtcacgagctacaccatctcttgtttgctctgcccaaattgcattgaatgagcaattcgaccagatacccgctgttaaaccgtactgcatatattcaagaataatattattaaagacgcactgataagcttctttagcaaacagcacagggtatttaccccattgccatgagcagttgtcaaaatatgcagtagtactttgtttagaatcaacatcagcaatataaaaccctgcatttgatgcactaattgacatcaaattttggacacggaacgaaaccgttgcattcgataaatatacttgattgtaaaagcctgaaatatttacatttgaaagtgtgaagttataaccatcaacttttaaacccgaaatattttctgaaacaccctcacttactaattgcaaatctcttacttcggcgcccacgttaataaatgccacattattaagaagggtatttgaatttgaataatcacctggtcttacctttagagagttcattgcatacgcagtggcattttgtctactaaatccacctccaacaatccctttacccttgcaatcaacttgtttattgatgcgatattcaacttgtctgttagcaagataaatattcgaacctgtgtatggactcaacgcacatcgaataaatgcgtccgcatcgtcataatttgggtcgtcacccagaccgccaaaatcatcaattgttggaaaagcaactgtgattttcacccaattcccgccatttgcagcaacaacaatataaccgtctggaacttttgaactatcagcactaaatacaaaagtccccccccctaaatgtttatcttttatcacagatcgtacatttacggtgcggcccggccatggcaatgtagtagctaaatcatcaatacaatctaatgtactgatagtttttttattaaattccctgagattttcaccagttaaagtcagcaccagtgtatctatccacccgttttcgcccgctccagctgctgccgcaacttcaattgcctgtttcaaatcatctactgaaacatatcccactcccaacatctcttcaaaaagtctggaaagcatcggtaatgatttaaacgggataccatatcttggctcaattagtgcgtctgtatttacagccttgcctgtatcttcaatatccctttccaaattttggaaagtttctggtgttaaaggcataaaaattctccaaaaaaaatccccgctaatgcggggacttaaaggactggtatttaaacaagattgttttttatgtcgctatcgttttgatagtaacggtcatcaaggtttacgagtgttaattcattttcaaagacacctgacctttgtttagtagtaatgagaaatagatcgtcctttttccgatcatcagttgaaagtgaataaactgtcttaacttcaccttctgttacaagtgcctcaactggtggccgtgcaagcacaaactcataatcattttgaccctgtgtcacagggatgatgtctatatatccgcttttaagctgcaaatggattacgaatgaatgctcggtagatagcttgcaaggctgcgaacctgtgatgtttaagccattccaagctaaaacctcgcccgataaaatcgcttgtgaaggatcaccaaagaatgttggtgcgagacgagtatcgtcaaccactgcaactggatcaccactaccaaccaactcaccttctgcaaaacaagaaaaacgacaattaattgcttgaaattgaattttgttccaagcacgccacgcaacaatatgtgcttgctgcttataaacaattccatagccttcaatttttttcgggttagtgatttggtcattaggaattttcaaggttttttcaatccatccagcttcactatcaacgtatgtcatctcaacaccgtcataattgttttctggttttgttcggattgtcctaacttctgtacgggcctttttatttcgatgattgaataataaataaggctctcgacccgcccgctcaagctcaaagtaaatctgacgatttagacggcgatcattacagcaagagacgcccgccaacattcttagaatctcttcaaatgattgattagcatcatcaattgtgtaattaaactcagccatcttttctgagccgaaataatcgacaacctcatcaaaaactgaatacagtttttcgacatttacttcattcaatgttcttcgtccaatcaacttatgcaaagctaattcaattactagatcaggaataaatcttgaaggtatgcgggtatccgacttaacaccatcacggtatgagtaaaccagactttctgctatacagtttgtcattcggctatcaatggccgttgctgcacgtgttgcttgtgtacgttgacgaattaaaactcggttgtcatatacaagcttggataagtaatgatatgcgtatgcggtataaaacttagtttcgtctgatagatctacagcgtcaccattgtcatttgtacggcgcgctcgaaagcgcactgcaccagtaaatggcaatgtaatccacattgagccgccgacactatcgcggttattcgctttaccattcaggcgtattgtttggttataaacattgcctgttgggtttccgtttaatacttgctgatattcaacataaatatctacaaacttagcatcggatccctgataaataccattaagcgcctgaaagttgagtagcaacccagtagcttttgctgactcaatcgtaaaccatccaatataattttcttggctacctcttaacttaatagttccaacacctgttttttgatctgttaaatccgcaagtttattccagtcatcattcacagcactcggagtggctaaggaaatttgtttgttcgttatatctacaccggttacaacataattaccatccaagaaaatgtttgctgaattagccgtaaggtttgcagataaattggccgttaaaacttcggtaagatttgcaaagtttgagtttgttgaaactggattctttaaatgaatcgtataaacaccagacacataggtaattgtgtcaatatcatacaaacctgcaagatctagttgcccattcacaggatcagttacaagcaaggaagttacattgattttgcggtaatcttgaaagtctacaacggtttggtttgaagcaatcgaaaatgtattattggtattgtctacatcaacttgcccagtaatagccaagtcattaataccaaaattcgccccactaataattaaagagtcattaatatcaaacgcattaaatttatctgctgtaccttgattatttgccttaattaaatttggatactggaaataaatgtcactcgcttcaatacgtgtgctatttggcggcaaaagagtttgtccgttaatagaagcattttgacgggcaataactggcggctggtcaaatgtatcaccccacttaaatatagtttcattcccaattaaagattgattgtgtccataagctgaaaggcttgtaccgggtatctcttgtatcggtgtgtcgcccgacttgaagttagaaacttgaacggggttttcacaaatacacatcaaagattcttcaacttcgaccccatctttaaagtatttgatgactggagcaaaaagatctggaatagctttaacacgccccaaaatgaaaggtatacgttgttttaaacgctggcggttctctggatctgataagttattgttacttgatccagacattgagccgttattgctcatgtttggcttgggaactttaaccaaagcagaaacagcagaacccagaatctttgttgcaacccatgtcacaaatgagcttaattcacccggatgacaaacaatactgcagtcatctgcaatttcggttaagcgcgcaattgatgccttatcttttattgatggtgttatgtcattttccgggcaaggattaccgagataaatttttgcttgaggaaattgtttttttactttaagaaattcaaacagaatattatctgtatcgattacatcaacttcgttcttgttgagagagttctggtaaagataaatttggctcataatatcgaatccgactaaaaatactattcgcctgctctacagtgattctctgcggcccgcgttcgatcaaatgaaaaattcgaccctgaaaaaaaagccccacgtgggagctttgatctaggtaagtcattaagacaatgcagccgtcttccggctttttgatgtgcttgtttctgtgaaccgtattacgtgatgtttttattgattcctgtaatggtccggttaagcccaagaaacacggcgtgtaatctttctcaaaaatgacctttgcggccaagatgacgaaatgcacgcaatggaaattttctggatcatagacacaataaaaaagctgacgaatattcatgagtaaaatccttcaagacttggatctgtacttgcagaataaatttcaccgttacctgaatcattcaagcccggagcttgcgcctcaaagctagtacctttccaatcccttgtaattacaataacttcaagccctttagcatatgtacacggcaggtcatatttgccgataacatatgctctataattcaatatagggggtattcgaaccgagtcttttaaaacaagatcaaccaagtctgggatttcagatcctacatcaccgatagctgccgtaattttttgatccaagttctcctcttcattactccgtgtaatattgagaggagcaaaagaataggtaaaagtctgcccatcctcatgtgttagatccatcggatcactactattcacaatatatctaagtacacgaggccaattagggtgtgatacttcgatacattcaagcaagccgactggcccggatgactggtctaaaactgctagcatttcatcagtaataatcatcactaaactcctgtagcgttcgggaaccattcatttggtactttttcaattgtgcctataactgccgggcctccattttgccaagcctcaataatgtccctgtcatttccatgatcacggtgaataggcttgattcttagctgaaaactgagttgaaggatttttccatctcgctctacttcttttggacgcgaatctgcaacaaatctgcactcgcattcctctagccttgcattgtctaatgctagcctccaaagccagttactaggtttgtactgcttgtcacgccaaaaagcccagaagtactccttttcttcctcattatttagagagatagaaacgtttaccgtgtgccaagctcctacaaaaaaagggacctgtcttggaggtcccccttctgtttcttgctctcgcaaattgctgcccggtgtaaagtcatacccctttaacaacgggcagagcatgaacttatccaatttttaccccctgtttcttgagatattgaaactttcctgcattgcttggctgtacttactgtttgggttgtatacatcatcaatagtcacatacaccttcccgtcatcaccaacattcgtttcaacatttgctttactgttgttgtaaaccacaacttgaggtccgctatctttttgattgttcaaatagttagtaaggtccttgttttggttgggattcaatacacgctcaccaccatcaagcaaccaagtcccctctttgggcacactatcaataccattgtgcgccatacctgtaaggtttacagatttgatctgagctgcttgtgcaacttgtactgctacagcagcaccagccaaaacaggtgcaatgtatggcccgatcattggtattaatgaagcagatgtataaacgtttgagtaagtctgtggtgcattcataattgcttgagcaactgcaaatgctttagacatggcaaacatggttttataggctgccgattgttcacccattaaaccacccattaaatcagccatcccccccaaagtttcagaagcaacccttgctccaagtgccgactttttaagctcataattttgatcgatcataaacatacgatctttatgtgcttgccaaattgcctcttgttctgcggctgactccgaaagagctgcttgtgcttctgcaagggccatagattgtgaagtttgcccaagtctttcttgatccagttgataaagatcacttgagccatttaggcttgcgttagtgctatcccacgccatgctcgcttgggttgctttatctaactttcctaattgctcttgagcttgtagtaacgcaattcgcttttgctgttcgtccttagagatttgtgaattaagtaaaatctgcgaacgctcgaatgaaaagcgtatttgcatattttccagttcagttcttaaaaatgcactcgcatcacttaagcgttgttcttgagcaagcttttcccaagctatttcctgttgtttttgacgctccaaagctgcagtaatttctgctttttttgttgtgtcatactcaacatttgcattaacaagttgcttttgaatatcgtaatcacgttcaatttgctttatacgatcagtttcaaaagagaagtattggttatactcctgttctttttcagcttttaatttcgcaatttgagcggcatataaagcatcctcttgagcaagtttttcttttagctgcggagttccaccataagcaaatgtgatcttatctacattatcttgatgctccttagctagtcgttgagcttcggtgtaataccgagcatcgacatcttttttagcatcatcaatggctttttgagattcagctgccttattaattaattcaagttgatctgcctgtgtaggcattaaaattgaattgtctacagtagattttccagatactccggcgaaccacttctggaaacccggtgcgtaaccagcaacctctttacgcttgctatctgatagaccacctctcaaataagttcttaagccacctgcacccgcattgtaggccatgagtgctttatccatggctccaaaatcagccaaatgtttagataagtctttagctgctgctgttgcaatttcttcagtagaacttttggcattaagtccatattgctttctaaacacactcgttgtttggaaaagaccaattgccccggtaggacttcttgctccggcatcagctccagattcttgaagaatcaatgcggcaagtgttccagcaggcaaaccatataaactttcgatttgagcaaaattatttgtctttgcaatgccttgcgcacgagcaattgccgccaactcgtctttactaaaagtataattttttagattgaagttttcgcgggcagcaagtagcacatcctttggcaatggtgctttaaaagcattttctccatttgctgcgatctgtgcatcagcatatgcattcgccttatcaactcctataccttctcttacaagggtcttgatatatccttctctaagcacatcttgtttggcttgggtaatgtagtcacgttgtttctgtgttaaagacatccatgcttttgcagagtcattaactgcctttgcttgatcttgttgcgccttagttgtgtcattagttgcgtttttaactaaattttggatctctttttgacgatctatagaattatttgcctcattgatttttgtatctaattcagcaataaatttaagagtagtttcgctaaccaatccctgtttttggagatcagagaaagctgttttcgctttatctccaccttctttcaaactcttaagatagttttgaataccagttaattgtttagtgtctccttgaactcttaagtcgttctcaaattgttccaaagcgataaacaaactttttaattgtttagtttgtttatcaacttcctctccagcttcgatacttttaagagctagttgcgatgctgttaattttttatatttttcccttagctcatcaacaacaagaccttgatcttcaagtgcatcagttgcatcttgcgtctgtttagacatcaaataataggcgccaccagctacagccaattgcgtaagaagcatgccaatcccagcaggaccgcccaataatgccattacacttgttgttgcgccggctgttctagcgaagtttgctaaacccacaccggcacgcactgcaaacaatgctgtttgtcctaattgataggtcgccataaccaaagctgggacaaatcgactagcaataccagcagcaactgcaatcgtaaccgccttaatgtcgtcccaattctctatcactgtttcgatagcaggaacaacactatttacaagtcttgcctcaacgccctgccattgcaaatccatcaattgaaggttttctcttgcttgagctaggcttttaactaagtcgtcagacataattgcgccagcacgctcagcagcatcgccccattttttaaaaccttctccaccattttctaacaatggaataagcaatgaagaatctgaaatgattgcttccatatagaacttcatgtcgttcgttgaagcaccagctttttccaatgagttgtaaaataattgaagcgcatcaggaccagaaagtttctgaaactgttgaattgttactccaacctttggtgcaatattttcaaagaaatccgcaagaggaccaccgcccgtttgctgaaagtcgcctatacgatcctgcatatccttcattttatcggcgaaggattccattgagataccagcagtttcggcaccctttgcataatattgaaaatcccgcacagaactgtttgcaagtttcgaaaacttttgtatgtcattacctgcctgaatgactctgtcgctatagttcacaagctctgcaattgataacccagcaatagcaccacccaatgcacttatcgcaatagctgcaacatcaaatgaatctgcaatccctttacttgctgacttcgctttgcgttcagcctgtgataaaggctcagtaaagctggctgtttgcaccattaaatcaagtgttaatctgccaagtgatgttgtggccattacctttctccgggcaataaaaaaccccgctaattcgcggggttttttaaattaatatttaattactgcttgcagtcaacactccaaacttgattgaatgcagctatagaggttgggtcagagttatactcattttcaaaatatattttttctttggtaactatataacgttgaaagccggtgtaagcgccaaaactatttttagcattaacttcaccgcacaactcccattgattacgaaacttagctgtttcaccatcttttaatttatctttaaccaatttctgtacttgcaaatcaagatttttcctttcttcatcaagtttttctttttctgttttcccacatccgagcattaagcaactcaaaatagcaataattaaaaacttattcatgtgcacaccgtttttcactttttttcaatttaacaaaacggtgtgtaaatgtcacatgccccaccttatgatagggttagttactatgatacttctcaaaatactcctctaatgacaattcttcgtcatcatccggaggtgtttcatgtggcataaatatataaggatctacttttgtaccttctttaaccttaaatcctgtgtagtgagccatccaactaccaaaactttgctctagccggcgacctaagttaagagagccgtatttttgacgataggctctccaaaacatcacctctgcatgactaagattctcttcagcctcctctaaggagcctccaccgattccgttgaggacaagctcggcaaagagttctctatctgcaaggtcttcttccgtgactttcccataaagttattaacttcatcggcagctgcatatagcgcattgatcaaacttggctcggctttatagacgtcgttcacacttgagaagaaaggcgttcccttttgatcagagcaaattgaaccaagcaactgagccgattgcattagggttgagtcaacccttttaacttttgaatcctctggattcttatagttaaactcccactcgactgctttagaaacctctcggctctccttaaagctcatttttttaacaaaaacatcagcttcaagttcaaccgtttcaccaagttctaacaatgagtttttggtcaattttttaagtgaagcaacattactttctgttacttcaacattccatataaccgtttttttaactggaacgttcagagtagttatactctgctttaagtctgtaatactgatcttagccattttatggagtcaccgtacgtttagtataagttacacccgaagttcgtactaaagtgaactcataaccgattactgtatcaacttcgatgtcattaggggctgcatcatttagatagccttcaaatgaccaccaagaacgagtttctggcagatcaatacctgtagttgcatcatatgttggaggcgttgttgagtggcttgaacctacataccactgtagcttttcaccagatgcagcaatttccaataatttgtcatgacttgtgttttcatcatccaaatcaataccaattgcaccttcacccggatcgcgcatcccgcgttcatattctttgacatcagcatctagacaggttacatcaatctttccaaatgagtcttgaccaaacgaaatacgcttagggcaaataaaacgcacaacggttcccgcaattacagtaaataactgcgttttttgagctttaacatgtttagccattaagagcgctccttaatttttggcataaaaaaagcacccgaataggtgctaagtgaaaaaagttttgtgttttattcgcggtttacaatccaacttacatcaaaagaatagtgaggcattcctgttactgggtccttatctgcttcgccatagcgaaccacataacaatcaagctctattgcaaaacggattgcttctgcaacttgatcaaccacatcttcatctgttgcataaacatcgatttgaacaattgcactgtcggaaacaggccgcgaatcaagactgctatttgaatcacctgaaataatttgccaagtaacatatggtgtttcaggctgttctggagcagatccaaaacgccaaactctcaagatattattactttcgagtaatgctcttactgctggatctgctcttgctaatttaaaaattgggactttaatcattaagctgcacctaaaaccacactgagttcaaaattaaatacttgaacaaacttatctgttatctgttcaatgttttcgtaaagcgctggtcttaaaaatggggtggcgggctgtctacttgtacctaactcaaggaatcgccagtaaaagactcgcccatctgtttgatacgtttttccaacacgcccagaacgtctattttgggcattatttgtatatggaatacgtgccccaccacgcactcccacacgcataaccaaagtgtttttatttctacttcggccattttgaacaacaatttctttccaaattttttcaggagtggtgggatcatctaggcgtttaactttttgacgggcttcatcccgagcaatgttcattgcctgccgcatcgctttacgggcaatacgttttacagttttttcgttaccaattgcctgcatttttcttaaagcaggctccaaaccatgtatttgagtagccataaatcacccattccatgctttatcacctgttgcaaggttgatagttaaatactcacggcgtgagtcgggatctcgcatagggttaccatcaatcttgtaatagtaaccatcaaaaagaacccgcattgtgctatcaacttgttttgtagcgctgctatatcgcacttttgcacgggcttgtatcgagctattggctgctttggctgcaataacatcccttgttgaaaggtcagtaacttctgcccaaattgttgcaaaattagaccatgaggtgattaattttccagtgttttggtcttgggtttggatgggcttttgaatagtgatgcggtgctttagttttggagtaatgctgggcatattagacccccatttctctaataggctgcaaaatatcccaatatgcttgaggttttccttctagacttcggctgtacttatactcaataaatatcaaccgggcattatctaacttcttgcagtccacaatgtccgtgtcagaagttctttctgactcatttgaaataatttttcggtcgatgtcgatcgctatttcttcatcggcttgagctatccattcaagaaaaagcacatcctcatcatcgtgatcaactcgacattgcaacttagctcgttcgagtgtgatcattttgaattattccgtcttgtagctggttttggtggatcaacttttgtttggtattcacgtaaaactttattttctaccaaatgccttaccacgtttggatctgctgtgcgaatatcgccctctttgtagtctttatctccaaagtgtgggcgtaaaacttcatattctttcattttggcctctctaaatgggatggtgactaacaccaccccaaaatgaattaaccacccgtagcaggagtataggagccatatacaagcgatttaggcttataaacagctaatgctccacgggtttcagcaagtaaggtacgtttatttgatgtgaaatcatcgccctgcataccgatttgcacagcagcaccccagcgctcaaagtattgagctgcagtattgaatgcacctgttaagaatttacctgcatccattgcagcggtttgaactacaggcaagccccataatgttggaaccgcttgtgattgcggattcccgatgatgtagttgccgtttgcatctttttgcgtttccatcaacgcccagtcaattgggttgagtacatggccgtttgcaaagtcatcggccaatacaacttgaagcattgcaaaacgcaatacatcaaacatgtttggcgttgctggagcacctgcaggcggagcataagcagtcgcttgagggattaagccaagcatattgccattggttccatcaccagcaagaatttgcttttcaagcttgatgtcaagaccatggcgcaaaatgttgtcaatgaatgactgcaatgctggtgcatcacttaacatttgagtggtcgtttttaaccagtgagcaattacaactgctttggcatctttatcttcaaatgtaattccagattctggcttgtttgcaccttctgcaactactgctgcattattggtgaattctttcatttgaacatattcaatgagattcccgctcatgctgccacctgccaaaatgtcgcggatggtaaggcgcatttggtttggtaactgcaaaccaagattggtggcaggaataatttttccaacctcagtcgtaccaattgtgttcttcagctcaacacgctgaattccacgatactgactttctgcagcatttttgtattctgtagtttcaacaaactcaccacccatggtttgctttttggtttcaacatcaccattaccacggcgtgcagctttctgctccagttctgtcagtttgtttttaacttcatttaacgtagttaaagcttcgtccgctttatctttggcgctttgtgagatttcttcactttttgcttgtttgcctttgaactcttcggcgatttctttaactgtatcaacgtgtttttggaactcttgagcgagttgttctaaagttttttcagtcattgctgattcctcgtaaaatatttaaggcatttgaaattgatttcgctttttcgttttcaccctctgactcgctcaaaagatgacgcaaacccttactagcgatgacagtggcttgcgtttttgaaaatcctgactctctcaggaacttttcaaattctggtagggatggcagctcgccatcttgtaatttggatttgacggaactgattagggtttctggattggaaggaaaggcaacaattgaaccttccactaactccagttccagcagttcgcggattagtgagtctggatcgcgcctataagacttggtgatatagccaatggacatgccatcaatcgcgccaaccttcatcagcgcataaatagctttagctcgcggcacatcgtcaattaagagacgaccttctacgtacaaccctttttcgtcttcacgcatttcggtaaaaattccgattggttcagatgggttgtgatcccaaaagattgctgggtacttgccttttgccttccactcttgaagagttttggcaaatgcacctttgcggatgatgtccccatgagaatcaaggttgtcaaaagcagctaagtagccagaaaaaaagccaccctcttgggtggctttgatttctaaagttagtttaagtctatccactggttttcccttgatctttcaatccgaccatttgcatttgaaccattagctcatcgccacccggtaaaggcgccaagtcttctaaatcccgcacttcattacgcgtcataacaccgttttgaatcatgtttgtgtagaaacctgagcgagtagcactgtcggcccgtaataagccttcaaccgcaaattttggccggtacttgtatttttcacttggcaaaaacaatctctttgtgattgtttgctcatatctaactaattgagggttaagcgaataggtcaaaaaccccctattagtctgctcaagacttgaagcccatgagcttgctttgtttgtatgaccaattaactgaggaggaacaccaaaggcgcggcatatttcttcaatgccaaaataacgagattcaagtaactgggcatcaacgggattgattcgaatactatttgagccagaaagcttcattccagcctcaagcaccatgtacttaccagcattctcaggtttactgaactcacttaaatggtttcttagtctttcacgctgctctttagttaaagtttgctccccagtttcaaggaagcccccaacttttaagccattcttaaaccagtcctgagcttggttgtttgcatcaaactgcattccaatcgtttgagcaaaaaactgaatagcagataaaccaacaagcccatcaagagtaaaacccttgaaatgcaagatttggtcttccgaataggttgttgttttcccattttcagtgtaatgaaaatcaatcgctcccaaatcattacgttttacaaccataccactcgggaaaagtggctcaagagcaattacttttccgcttgagtcttttgtaataaggttgtatgcattcccccataagtcaacacaagcaacttgaacttgccaaaactcacttgcacacatatcggcattgggtgaatcgtgcaaaatacggtaaaggtaatgatcagtagcaagacgtttattgttgtcgtacaactgtaaaggaagagttgagatagtttcagctcttaattttacacacgcccagactgcggaaagtttcaaagctgtttctggtgtgacaaccgatccaccgggtgacaaataactatcaaatggataagacgaatcgcctttttttaattgtgtatttccagtcaatcgtgaccagaagcgggaccaaaaccccggctcttgtgtggtactcatgctatcacgacatcctctaagtattcgtcaatatcaacgcgattggcaggctcaggattgcttgacatcaaagcaactgcgttaaatgtggcaatcaatgggtcaatcttcccaacacctgattcttgcttggttattcgcataccattgccgaccatcacgacacgggcattacctgccgcccaagtcattagctgttgtccagcatggtgcagattgccttctgccaatttgcgctcagtagtaaggatgtaggacatgagtttgtagccttgtggcacagcaaacatgctttcctctggaattcctgcctcaagtaagccatctaaaagaccgcctaagcccaatggatctagtccgatcttattaagctttccactgtcataaaccttcttagcaattgctgcgagttggtcaatgtcatcgcctattcggtcaacaacagttagagaaccctcagacttgaagtcttcatacttaggcacattctcttttctgcgctctaaagcaatcttatttgcccatgcatgattccatagccaccagatacgaggatcttctgttaaacgacctaaagcagcgaagccaagtaagtcgtcgagaccaccgccatcaatacccaaagtaatgacatcggatagctcaattagttggtcgatttggatatctttagcttgagcattccaatactctgcacccgcccaccggttagcacgaaggttcatgccgatttcaatgtttaagtgtttggccaagaagtctctaagagattcttcactagcatctttaactttgttaaattccgaaatcagatattcaagatcaaccgaagcacccaagtttgggtttgtgatgtagaaattttcaggttttaaatgttcgcctgcttctacaagatgcttagggaattcataaataagtggtagaaaacttttatcaactttaattccgtcacgtacatctctggcataatctaaaagctgcttaaatactccacatggcacttcatccgacatggtagacagataaatcacacaaccttctggacgagatgctaaaccaccctttgcttcacggaacattgattcagcgttggcacgtttcccgaatagccagacctcatctatcaaaatgattgaagctttcttaccagctgcagcgttagattctgctgcaataactttaagtgttgctccggtacctagatgcgtaactgtttttgtgtgctcagatacattaaatctttcacttaattcttcatctgcgcgtatgaaatcccggattggattaaatgagttatcagcaacttctttagtaggcgcaagaataattagttcggcagattgtcgatcattaagaattaatgcagtaagcataatgccggcggcaatcgtagatttagtattcttcttcgaaatcaaaagaaagaattcacgaattaatctgcgctttgtgcttggatcatatgcgccaaagattgcacgaacaaactcgatcacccattccaatgtgacatcacccatcttagggctacccatcacatcaacaagaattaactctttaaagatacgctccgctacgtcagccactttggggaataatggcttacacggcattaacgattgtttagaaacaatacgggtcgcccagtctgggcaagctgtagtccagtctggtagttttgcagtcatttaaatggtccatgaaaaaaccgcccgaaggcggaataaatttgtatgacaggttgcgaacccctgctttaactacgctgtttcgcccactgctagcgggttattacgttggcagttgtggtcctccttcctccaacgcaccgtatcgcctacggatccatacaaaaccttttattgattaacaatcaattgataatcttcttcggaaaatctggaaaagcacttgcgacattgataagtaatcttcaccaacctttctgttgctggcaacttttcaatagagtcatgacagcaagggccatctttgatattttgaatagtgatagtttcaccacttacggtttcgtattctagactttgcatgcaaagttcctcttaatagttagcttggcaactgattgtccaatgtggcgtattttcctgttctggtcgcttcctttgccttgtcttgtttagtttcttttttgcctttttccgcaaccttcccgtgtttataaggcaatgctgcaattgctgcttgcattctaagtggcagcttgttgccattgaagttcatgaccttaattaaaaaatctaaaggatcatcaccttcaaattgaaattcctcaatagggttttcatcttcaccactattttcgggtgtatctttaggtttaacttttggtgaattagatgttaaagagcgcccttctttttgggcctttaacatttcaatatagacaataatttcaggatcttttgctaacctagcacctgcggcggatgcagttttttccgcataacctgctgaaattgctgcttctttatttgtcttgccgtcaacaatggcaagagcaaatttttccattttctctgttaatgccattgctctacctttaacttgattttaactttttgctttaactttttctgagagggaattttttttgtgcgtgcgatggggggcggtgtccaacggcgaagggcttggaagttttgacatcccccctgcctgctggattttttgcatcattatggtgcttcctgaacatgttcaagaatcttcttcttgccatcgtcattcacaacacaacaaatcaaactaccgcttcgcatatacaacatagcgttataaatgtattggctgtaatctttctgtccattccaattaaaaacggcgccttcaaggccctgtggatcaaagtagatgtcagagcctttgtctgcatctttcacatgaactagttttgaagtcattcagccatcctcttctaaatacttttgaaccaactcatcatcattcattgccggctctcctgttgggttttctttttatggcatggaacacaaagagactggaggtttgattcatcatccgttccacctcttgccacattcacaatatggtcaagctctaagtctttagtgacgatgccacaacattgacaggtccactcatcacgtaaatggatcttagctttaagacggcgccacggacggccacctcgaccagaaccccaattgttttgtttagggttcttctgggtttgtgcgggtgcctgtagcgtctgtaacttgttcttgaatgtttggagtttcatttaagtttactcgcgcatctacaccattaagtaagtcaatggatatccaatcgatatccaaaccgtcacgttgataactttgaaccagtttaactaattcaagctccagttctttgcgcttcaattcaggagttctatgctgttcctgcaaatacaaaatggttttatcaaacgacttttgaagatcatcatcaattacaaagaaaggctggcctctattcattgtcttcacccatctagtgatcctgaccgttgtgctggttcactatcttcaagcattgatagaacttcggataactgagcagattgttctgcattgatttggacgatcaagctattctgttcaatcaacttattgttttgctctatcagcttaagcaccacgtcttgcaaatttgaatcattgctcattttgataacaccacttaaggtcatccgggataatcaacatcacgcccaagtctctatgtgcataaatgttgatcttatccagatatttggtgaattctttaatggtggccttcttgctttgcaggtggtctttaatgaaggtattgaccaaaacttggtaatccttttcaagttgacggcgcttaggtccatcgaatgcttgaataacatctttaaagttctgcaaagccatgtacttttctgcagtctcttgccgaccctcaacatagatccgggcaagaaactttttcttaaaaagtaaatgaagatcatcctttgaattaccggtcttttgcctgatctgttcaagccaagcccagtaaagccgattttgtgcggcgctcctgtcgtcttccttctgattgattctaacgactaaaggtttgccttctgcggctgctttggagtggttattgttcagatagttaattacctgaacaatcccagaataactattgattgggaatgttgctggttccatattcccacctataccttattcatccacaacgggacgtttaccagcttctaaaactggaatgtttgcctcagttgggacatatacaatttgttgaatcttgccatcacgtaaagcatcaccaaacgcaccaataaactcttgtttgcggtactctggataatcttttgcagcttgaccaatagttttgatcgcttctgcacgcaacttggcactttcaagttcagctcgcgccgtttgaacctgaatcatttttgactgttctgcttctgccaatagtgcttgaccattcatgccttgcttccacactttatagtgaggccatgcaaacataatcaaaacaatgacaattaaaatggcaagaaagcaaagtgcggctaataccacatcagcttggcctttctggttggttttcatttctcgcttcctttttctaggcacaaaaaaagagcctttcggctccgattaaactaaaaaccacccgagggtggcttaattctttctagtaaattggtttaccattttctctattaattcttgtgtgagattttcagggtacgaaatcctaacctcatatccaacaatagttatgatgccataaggcccatttgttccagctattgggtcatatgaaccatcatccattaatactttgatgaaagaaaaattctcaccgtcatatacagcctcataatcaacatgcttaaccattgtaaatccttacaccaattacgttggttaaatcatatcaaaataaatcttgttctgactcaagcattgcgttggttcgcttaagccatttattaaatagctcctcgctttcctgtctgctccctagttggtaggtatcaaataaatgatggcaggaaaaacacatagaaacagttttagagtcgcaagccttaatggatctgcccttaccgtctttactagaattagaatgcgcggcttggcttggtgctggtgcaccacatctcatgcatggcagcttgcgtacttcggctaatcgtttggagtcacgcattcaacatggaccgtaaattattaatcttgtttttcaatcgcattatgatgcggtctataacaagcatttcttcgagactcaatccagtacgagataagttctggtaacggcttaactcttccgaatatttatcaagattctttttggcttcgtttgtatccatgttcaccccaatccatttgacttagacgaagtgagctactccttagctttgatatccactttggcaagaggctatatctatgcagcacacttctctaaattaaatggcacgccatgcaggactcgaacccgcatcaatcacactagaattatgatgtcttatccaattagacgaatggcgtaaaaaataaaagccccgcaaatgcagggctgtaaataaattcagtttaattttcaactttgcagatgagcatctaatgctttttcaagacttgggatttctgtgccatctactctgccatggtagccttttaaataaattaaatatctcgtgtcatctctatctaaatgatgatagtaaatagaatctacattaaccttacctgatgcaacatcaacaccatcgtcattgatagtatttggataaaatggcgtaaatccatcctcattaaattgcaattcaaatgaaccatcattaagtctaattgtttctaaacgaactagtttcataccacaccattaataaagtaatttgattaataatgcggcatgttaattggaaatgcaacgacttgatttaatataagtcattgtattctcaatagtaaattaaattactttaatctttccacactttctgcattctttctgattgaacatgtcggattcacactcccaaacatgaaaacagaatacctgcctgatgattcggagcatgtgaacctccaaaaaaatagccctacgtttaagcatcgactagaaatccagtccagcacatcggaatccaatgttctaagctcgtagggcataaaagcaaaaagcccaccgtttggcgagcttctttaagatcagtgacacttgcttatacttcgtaccacttatcacgaatttaaagaactattggcgccaagtcaagggttttctttggttttcttactttggcttgtttttcggttaatttactccgcaatgtattacgttgcccaacaatataggcaataccacactttaaatcttgtctcacggcgttacgtgagcatttgctaatgtcagcaatagtttcctcactcaacccatgcacgtaatacaacactacaaaatctagccattcttgtaatgttgggtttgggttcattcgtaaatcacgcaataatccacttacagctctcgcctcatcagtagagattttgcactgtggcaatgagcgctttcttgcatcacgctttacgccttctacagaatcaatcaagtaagttaaggtgttacgtgtacccaaataagtttcagcattatcttcattaatccatgccccaaattgctctaaccaattctcaattgtgtacttcttccaattacaagcttgtaatacatgcggtttattattcatcattccaccttaccttttgcttcactttctttcttgaattgatctaataatttatttctacccaacttcacatacaggcaagctgccgctcgtgtttctggtgttcttacaccatggttatatgcacaacgcagggccatcatctctttgtaggtccatttttcattcatgcctcaccacccttgagcgcttgctctaacttcttgccaatctcaaacattgaccagctcttttgaaggtctgatgcaatagacatagcttttgcaatgattagtccttgttgatccacccgcttttgcagctctgctttctcatctcttaaaccaagcagtttttcagcttgtgtttcaatcacttcgttttgataaacgagcttttgaccttgctcttttatgttgtcgttaagcatctgatttctgcgttgcagctcctccactttcgcttgcattgactgctgaccagcttcatatgcctcctctatgccaactgaatatggaatttttccgttactagaacaccactcaataaatgtcattggtttatccatctcaaacatcctttgatttacacagtgggctgatgtggttttctatggggaagtcgtcgcccatatcattgtcaatgcggtggcctgctgctatttcttctggggtggcgtggcgaatatctgcataaggagggaattcactaaaacacttagctcctgcttcatcccagcattcacgaacaacaattgagtcgtccaaaacagctttgacataaaacaatctttgatgcggcaagctgtgatatacgatcttttcaccaactttgtattctttaaactcactcatggctggctcctttttctgcatcacacgtttcacatttatctatatgcccccacccatcatctcgaatgaagccaaaccccttacaagccttacatttgactttctttttctcacccaccaagaaatatcgatctttctggttgtaggtaatatcaatagaacctgagtaatagcgccttaacgccccatcaatatgaaattcgtgtggacctacacaaaacatccaccccgaatccccgccgcactttgtaaaccatgtgaaatatgcttctctccatttcacataacggtcagacagatgaggagtcaacaattcaattaaacgtgctctaagcatctccatgcttgctgacatatctccatagtgatattcaagatcgtagctatactcgcctgtgttatatctagttggcatgagattcaccgcctccatatattgattcgtaatcaacaattgctctttctaatgcttgcttcacttcaggtgcggtgtaaggtgaatttgcatatatcttggctctttcaactgtgtagtgctcaatcaccaaagcaactgactccataagacgcttgaggtcatccatgttcacaagctcaattctcggattaaaacgatctgaatacttttttgctttggtgcagtaacacaatgttgagtagtagcactccatatatttacttgggatgccttcaacaacctctcgcgccttatccaatccttgctcacgaataaactgttctggtttcattggctgcgctcccacttgtcataacaataaaaatttagaaacaggattagtaaaattacgattaaatacccccaccaaaattgcttacgcccacacaaatcaagaagggtcaatgtgcaaatgaagtaaaaagtgctgtccatgaaggccaatggaaaacgaaaggttgttcgtttgtttttgggttgatgagtcttggcaaccaaagctgctataaccaaacccagaaaagttgaaatacaaataagaaccatgattgataagaacgttttcatatgaagcttcctgaattatctttactttcaagagctgccaattgatcactatgcacatttgagaagcggctatagtccagctcagaacaaagaaaggttttgcctactgagccgtcacgcacttttgcggcgttcacttcaagcaaaccgggtgtttttgacttctcgccgttgtaatactcatcccggtaaaggaataaaattacgtcagcatcttgctcaattgctccagatccgcgaaggtctgacataattggtcgcttatctgatcggttttccaattgacgacttaattgcgataaagcaaacactgggcaattaaattccattgccacgcgcttcaatgaatctgagatataagtcaaacggtcattttcagacgcacttgctggcaaatgcggtgtaataattttttgtaagtaatcaacaaaaatggcacccagcgaaccctcttccgatctcactttgcgcgcatgctttctgatatcagaaattgtgacggcgccatccatgatcatgagaggcgaattttgaataacttttgcagcctcagtaaaacaagtccaatcttcgccatccaactcagcatttttgatttttgaaagtttaagatcccctacgcttgagatgatccgcttggtgattgcatctcttttcatttcgatggattcaatcaaaaccggcttacgtaaattagttgcaatattggttgccaagttcaaagcaaaggccgttttacccatacttggacgagctgcaataacaactaaatcgccgttattaatttccccaattcgatgatcaagagctacaaaaccagtattaaccccacgaactctgtattgaccgctcatcctttcagtttggatgctgttgatctcttccattattgaaattacagaatgagaaaggtgctctacatcacccttgttagacacggaattaatattgcttaagagggtatttgccttttccaaaacatcatcggcagatccataacccacatcatttgcataaatctgagtttttttgccaacatctcgaagctgccgtctaaggtgcaattcctccagcatcttgatgtatgacttaaagttgattgctttgcctacgacattccctaatagctcaatgatgtattgttcattgataccttttgactctgccccaagcgacttaattgctctcaaaactgtaagttcatcaataatttcaccacgctcataaagtgagcgcatagctttaaaaatcacttgatgagtatgaatagtgaataaatgctcatgcatttgtgccacataatcagcagcctcactaatcgtcagaattgaaaccagaacagaggattcaatgcttggatctgacaatgggtccttttcaataccagttacattcaaatcattagtcattctgtaccaccctcagcataggctttgccatattggacacgcactggcgttggtctgaaaacttgctgttcctgtggttgctcagaagactggtgcgctacgtttggctcttgcccagacataccaatgaaccgatcaagttttgttgcttcacggcaaattaactcaatgtcagtaaagttgttttgaaggtggtattcagacttggagcaattagtaattgccaatttaatgtcttgaactgtgtaaccctccttgagtctggcttgaatcttagttttacgtttattgtccaaaacagtacggctgtttttgttaaacgttgttttccagaattcaaagatctcttggatttcttctttgaaactctcttttggtttttcagcgggtacaggttcgccgttaggcggacatatatttatattatttcccttatgttctattacttctcccttaagagcagaattcgaaggaattccgctagattgattttggctttcttttggagttccgttggaattccgatggaattcttgtggaacacttgtggaagactcaacccaatcttttggacatccagcagctatccattgttcacttgttggaatatctatggatttcttgccttctgactcaagctttttgttgtatttccgcattctgtccgcaaattttgcgtagtgatggccctgttttgatgcccagctttcctgtgctttctcgcagattgttgggtgatagatgcggccatcattgcactctttccagccatgcaatgcctcagctttaacctttacccattccccaatgaagcgaccaaaacccgcaagatttgcaagaatacgatcatcatttggaagtgatccagcaggcacttgatgccatgaagcacaccaaagcaaaacacctgccttaaatgcttccccatctgtaatagctgtgaaatcgctgtctctgaaacgcaccacatcaagtggcatgtatgcaaagtcgcgtaaatccacatcactatcaattaatggatcaggcaaaattaccccgccatcaatagaattattatcgtgcattacaacttatcctttgctcttagacggttaattacagcgctctcaaatcgattcaaaagtgcataaaggtgagaatgtttttgcaggtccgctataacctccccaattggatgggaagttttgttgaaatctttttgaacgcccaaagccttttcaggttctttgcgagattccttgtactcagctattgagtctgcatatgcgtcatgatcaatttgccattgagtaaggacttgatcctcctcatcatatgggcttgcacagtctgaattttgtgctaagatttgttcattcattttggtttgctccaaaacacaaaaccgcctctgctgtaacagatggcggtttttttaatttaacgattgactcgatttgctaagtaaatccgcctttaaaatcccttttgattcaatttctaaaaaggcctgtgttcttagcggaattccttctttttcccacttccataaggtaattctagaaaccaacatctttcttgatagctcctgttttgagctacaatcgtggtagtccaataagtcttgaaggttcataggttaacttaaattatccataaagttaacttaagttatcatgctgggattttattttcaatatagtgtgttaatataagttaaccaattcactgcgaatattgttatggaattacatgaaagaattgtccagaaaatgaaagaaaaaaagttacgacaagtagacctagccttggcaacgggaaagtcaaaagtagcagtattaaaatggataaatggagaaaatgtacctaagaccgaatcgcttaagaaattagcagaattatttggtgtttcagatagttggttaatgcatggtactgaagaaaaactggacaataatgttgttttaagtgaaaagatgccatcagatggtcgtcctgttccagtgatatcgtgggttgcagcaggttcttttagtcccattgaaactgttttaaaagatactgaaattgaggaataccttcccccaaatcgtagatgtggaaaaaatggatatgcattaaaagttgttggatactcaatggcgccaactttcttacccggtgacagaatttatgtaaacccagacatacaaacatttgatttaaaaacggatgatcttgtaattgttgcatgtgctggcgactcagaagcaaccttcaagaaattaataattgagggagaaggctcaagtaagtttcttgaaccattaaaccctgattggcctgataaaattataaaactatcagaagattgcagacttgttgggaaagtagtaggactttatagggatatttactagcaaattcacgccaataataagaaatttttataaaatttgcccacttttgtgggttttttattatcaaaaaaattaactaaaataaatcaaaaataattattgacgcatttagttaatttaagttaacctaatttcacaaacacaaaaagccccacactgtggagctaattttaaacctagatgctttctctgtcctctaccaaaatttcagagcagcatcgctataactggtgctttattatgaaccaaatcacagatattagtcaacaggactgcattagcccataccttcgctcatcaaacaaaaacaagactcctgaaaagatgcttgcccaaattaatgcatggttgcttgatgaggacttttgtcattatttttcaattcaaatacaaggccaagaggtttatccattcggcgtgataaatcgtccgttctttcatcttgatcaagcagaaagaaagctagaaagcttaaaaagcgcaaaccctaaaatttgttactacatgagttatggtgcttttgataaatcaatcttagattttgaaaatgaaaatgcccctatgtgggagcgtgcttggcttaatcaacatgaattccgtttgatcaaattgaatgttgaaaaaatggctgaagaagatttagttaagctaattccaaactataaagatgttctaacttggcaagcagaacaaaacacaagtcaaagctgtcattactacttttctcaatcttttgatgattcagaaaatgagattaccacatcatcaccattctatttcaacctaaaagatgcattgatagctaagttgtattttgaaaaaacaatgcctaaacgccgcttcaaaattcattctggagttatgtctacacaaggattaatgaagcttgatggtggaacaagtgaacactctcaaggcttagttgatgctcacaaagagcgcttagcttcacttaaaaaataaaggggaataatcatgcgtactagttcacaactttttccagaaaacaaaagcgtgactgtggatgaccttattgcagctcgtagtgaagctaagaatgatatgggtgatatcaatgccctactgtccgcaattgagctaagtcttgttgaaaaactaaaggatcacaacttaagtaagtttgcctttgataaaacctttcgcttgattgatattgccaaaactcaagcagatttatctcaggattatcacaacggtgagcttgctcaattaactggtggtcaataccaacttgatgagttgaaaaataatattacacacctagaggttgtcccagagacgcaagtaatcaacacaaatcatttagctccagcgaatgcggccatctctaaaacacttacagaaggttttaagaatgacggacggcgttaattacgccgacctctctagggaggttctttttaaggcgtttttattatggcttacaaagattgggtatcgcggaattgttagaccttgtgggcgcatggagttttattgcgccacagtcagcaaactttttcctagaaacgtgcacatcacgtatgacggaaaaatgaataaggcagctacccagctttttaaagaatttgaaaaacatttgaaggcatgatcatgagtaatgtaattcgctttagacgaaatgggcttgcacataagatcagcccgcaagatgtaaaacaaagattaatcaacccaagtaaggatgttgatctaaagaaagcagatcaaataattggaattgattttgaaagcttgccacatgatgagcttttaaagttggctagagctggagctatagaccttatagaaacagatgctcgctataagaaaaccaataatgcaactaaacagattcttcacttgctaggtagattcttggatcgccgatctaaagaggaatggaagaagtataacgactccatgacactagattcagaagcagcagcaagagctatcgcctttgaggaagccaataacatcttgccagaattagcgggcagtacgtttgccaatgtgtttgcaaataaaaatgaggtgcaaccatgaactttttgaaacaagtaactcttaattataagcaccttcaagcaacaagtctttttgctgcacatcgtgaagtaaggttctacttaatgggtgtattggttaaagatggagtgatggccgcaacaaatggacattgtgctcttatctgtgacgctccagaagtaaaagatttagaggtgattatcccaattgaaatagttaaatcttttattaaaaaggtcggtaataacccaaaagtaaagactatcactttaagccaaattgatgatgaattttggttgctggattacgaaaatgggatgtttgaattcttccgaccaattgacggcaagtttccagatataagccgtgttgatattccaaaaccgaccgaaccccctaaagagtttgtgcagtggaatttagaatatgtgggccaattcatgaagtgctccaaaattcttaattgccgattccctctcttttatccatctggtgccactacttcaacttatgtggaatttgtggacggcgtacacggcctattgatgccattgcgagtttgaggagaaagctaatgttagatttgaataaggaaagagaggcttttctgaataccttccaatattacaaaggaagaagagatattatttttagtaatgagcatgaactgtttatgactagatcaaacaatccttctgaaattgctcagaaagaaataagcaacatgaatagacgttgggatgcttggcttagatgtgcaaagcatcgtgatgcagagctagaaaaagccaaagctcaggcggtgccagagggttactgtttggtaccgaaagagattccagacagcgttgttagctgtttagaaaatagtggattccattggggcgatgggactcgtgatcattacacgcctatttattctttgatggttgaagtggcaagcgaatcgggagctgagggatgagtgaattatatagcagtcaagctgtcaaagatgttcttaatgaaagagaacgccaaattataaaagaagggtatttacctgaatttgataatctctatgaagcaaatgaattgccacgagctgcatcttgttacgttgatcatgtagtaagtagaggttgggtttataacagcaaagatttcggccccgaagtgtatatggatgaggatgctgcaggatggtggccttttgctgatactttctggaaaccaaaaagcccaagacaagatttggttcgtgcagccgctttattaattgcggagattgagcgtcttgatcgagaagttaaagcggaaagtaaggagtaatgatgaaacgtttaaataaattagcccgcatgactccagaggaaaaatctgcacttaaaaaagaattttgggaagctgcaaatgatgagccatttccgccagaagtggtcgccgtggttctggatgtttcaacttcgcttctgcagcaaaagcgaacccatggtggtggaattccctatacaaaagtcagtccacgtaaagttctttacatcaagtcagacgttattgagtatgtaaagaaaagaaaaggaactaatacgtctaatgtaagcggctcataagccgcttttttaatgcctgtaaatgtagccaagatgtagcctaaaaaattaaaaatgtagccgtgtagccagtatgtagccacaaccataaaagccaaatagcgcataatattgtttaatgttgcataatcactaaaataatgatttatttaggcttttattgttgcataatattgtttaatgtcgcctaatgttgcaaagatttacaaaattaccttgaactttagggttcaagggtaacgacatgcagcggcatcttcggagcatttatttttaatagataacaataacttaaaacaaaatcccctacttaaaactctcttttttaatagaccaaaccttcaaaatagactcttaatagacttcacaattattgtattgtatcgttaggtattgctttgtattgcttaatttaaagatggctcaacacattaaatttactaaatcggtaatagactctattcctttgtctgaagagaaacaaatcttttacagagatacagtaactataggatttggcttatgtgtgggcaaaactaaaagctattttgctgaaaagaaaatgcctaatggcaagtctaaacgtaaagttattggaaaacatggcgtctatacattagaacaagccagaactgaagctaaacggcttcttatcttgatggatgaaggtgtagatccagttaagcaaaagcgtgatttacgagcttcagcaattcaaaatgatgccttacaaaagctagtccctacccttagtgaagcttaccaatactataaattgcgtaaaaagctggcggaaacatctttaattgcctatgacggatgcatagaaaactactttagtgattggaaagatttaaaacttgaccaaatcaccagtgcaatgattattgatcgtcatctgaagctttcgaaagcaagcccttcccgagctaatcttgcatcaaaatttttacatgctctctttaaccatacgattagcaggtataaggatgagtccgggaataaaattctaaatataaaaaacccggttgttatcgttaaagaagaaaaagctttcaataaaattaaacgtagaaaaggccatgttcgtgcagatcagcgcgaagcatgggcattggctgtggccactacttattggatgggtgaacaaaataacgattttagagcgtacacaaaccaagactttttattcttacttgctctaactggttttagacgtagtgaagcagaatctgttgaatggaaaaatgtagatcttcaatttggtaccatcaaaattattaatacgaaaaaccatgaggatcttttgctacctatgggtgataccctttggcacattatgcgtgaacgaaaaaaacgtgccggtgataacaaatatgtctttaccgatagaaatggtgtttcccatatttcagaccgccgagcagcacgtgacaaagtaactgagaattctggtatcgaatttacgttccatgatttacgccgcacctttggcactatcgcgaacagcttggccataggaagctatacgattaaaaggctaattaaccataccactgacgatgatgataacgatgtgactgatggatatattcaagtttctttcgatgatttaaagaaagctatgaatatgattgaagacgtgattatttctgaaccagtaaaagcattaatcaaaagtcgcttatatttcgagaaaaatgaatcgagaaatcaggctcaagaattaattaaccaccacattcaagtgttagataactttaaaatggcaggccaaattctagatttttagaactcaagttttaagaaatccttaagtaattgaaaaattcttctaaatagttaaaattaatgtgacgcatttatcactttatataaattatgaaaaagatatttttagctgctttagcaacaattggtttacaagcctgtactacaccttatcaagaaatgggggcttctggtggcgttgaagccactattattgatgataatgtctttcaagtacgcgcatctgtaaacggatatacccataaatcgatagcaaaccagtacgcattacgtaaagctgctgaagtatctaaatcgctagggtgtagttatttctcagctattaacaatacaagccagagttacaatcaaaatatttctaaagttgatgctggccttaagactaccccaaatggtgtctattatgtctcaagtgctggtacacaatataagttaattaaaccatccagaaacaatacctatgtttgctttaatgaaaagccaaacactgttttgcctggtttaatttacaacgttaagtatgttctgggttctccaatgcctacaggtaaattcaaagttccgaatagctggcgttaaagatatataccatgagggtgaataatagcgtctacagtctattatttaccctctttttatttatattagttatgatggaaaagtaatttcgaaaatcataaagaggttactttgtatgtgcgcgaactatgaacctataaataaagatcgagttcacctactagatctattcgaaccgacattcgactataagaatggtgtttatccgggttacgactgccctcttattttttaaatataaaagaaccaatacattttataaaacgaagcaagtctattttgcttcgttttatataaattaaaaatatatttatttacattggctcaacatatcaagtttgttatttactacctgagtttttacatccagcaaacttaacaaacttgggaataaattatcctgacttaacttttgtttagtttgttggcttaaacaattcacttgagcaagattatgttgtttccaactttcagagaaccacataatcattggtacatgtgtttgttggctcggtgcgattgcataaggtgaaccatgtaaatataaaccatgttctccggttgattcgccatgatcagataaataccataaacctgtctgatactttgatatttcttttagagtattaatcatttggcttaatacatggtctgtatatacaattgtattatcataactatttagcaattcagtttgcgaacagccctgtatcgcattagtatcacaagtcggtttaaaaggttgatatgcctcaggtgcacgcttgtaatatgcaggtccatgactacccacttgatgcagaacaatcaaacgcggacgatcatcatctttggcaatagtagccaaatactgctttaagctgtcaatgagaatgtcatcataacattcgccatctttacaccattttttctttaagttttctggaatctggtattgttcaacgcgatcacatgcacctttacaacccgagttattatcaatccaagtcacttggtaacccgcacgttttgcaatatctaataaaccttcgcggtgactagctaattgctcatcataatctacacgtggcatacccgagaacatacatggcacagaaacagctgtcgccgtaccgcatgagctcacttgcgaaaagttgaaaatatcttgtttagaaagctccggattcgtattttttgcatacccatttagagagaaactttcggcacgtgccgtttcacctacaacaagtatcattaacttagggaggttcttttgtacttgctgaacttgatgagcatcttgtccatatatcacaagaggcagatttttcttcggagccttcttatgatagtaagacataagcgatgaaatactattttgcggtgaaatcatcccttttaaatcacgatgctcacgaaatattgcagcgaaatcgacatagtaagtaaaaagtaaaacaccgaccactgcaaatgaagctaccagtgagaatactttcttcaataacaaccgtgatgctttttcttgtttaaatttaacttgagtaattaaaaaaatgggcaaaataacaaaaaaaactgtccataaaacaaagcgtaaagagattagatcggtaaattccgaaacatcggtctgcaccatattttgaatttggtcgggtgaaataatgacacccaatgtgtttacaaaataagagctaaagccaccaataaatatcaataaaattgcaaagattttggcagtccatttccaatttattaattgaaaaattaaattatatgccgctattaaaataactaatgtcgcccctaagaaaagaactgacttaataccattataaggtgtaagttgatggatttttttaaaaaaacctatattcagaaataaacctagccagatagataaaagcaaattaaaatttaatagtgtaacatccttgcatatttttttgaatttaaaaacattaagtgccatttttaaaaaccattaaatataaaaaatgctaagattagataccataccttaaagaaaaattaaaaaagaacctttgtaatattctttatttatatgacgatggctccttgagctaaaaaatcagttcattatttgaacacattttataaataaaaaattttaaactttataattgattattttaaaatcttaaaaccgattaattattcggctttaagactatatttttattactaaatttgaagacaggagataagaactaactttatatctttagcaacctaaatatgcatagttatccccagttgaaatgctcgccctggtagaggggcaatatattttagaggagagttttgtggtctagcctcttcgttcagcagatttgtaccatttaaaaatatatcaaatgaagcatttttaatctttaattttttatctatcttaaattcaagtaagttgtaaccagataaaggaacttcctgtattacattcttacctagatatcttggctcatcgtagtaaatacttgaaattttacctttccaagaatcatttctccactcaagaaacatgccataacgattagtaggcatatttggtaggtaaactccatcattagctaaccttatatctgtaggattaacagccttatttttaacaaaatcagctaaaccacctagtttaatattcccaatatgagctagattaaaatcataaattaaatcaatttcaaaccctttgacgtcagtgtctgtctgtttccagtattttaaaggtaatcgattttgcacagcaacacctgaatgagataaatacatataattttcaaaatccatttgatacccaacaagttgcatgacccaattattccaattcaaaaacatacctaactctaaacttttagatttttctggtttgagattctggtcgccttcttcttgtgccataacagaatagtgaacattacttgaatagagctcattcacttcaggtgctctttctgaaataccataatcaacttttaaatttataaaattattaaccttatattctcctccgataaaatattggtttaaattatattttctattttctattcttgaattactagcatttcttgctagtttaaaatcattatcttgaagctcatgttcaattctttcaaaacgatagcccgtatttaaagtaaattgtttgatatttaattcttcttgtaagaatatagctttactaatagtacttacattaggtaaatagcgctgagtaccacttccttcgatattcctatttttaaggctaaaaccaagtatcccatctaatcccttaaaggatgactgtttcattattaattcaattaattgattatcaattttatactcattagcttttgcagtaccaacatattctccagatttattagaaagctgttgaaaattcaaacttatctcttctgcagaggaaattggttggataaaattggaatttaatacaaaacgattttgatctattttcacaccaaccggtaatgtttcataagaatcagcaaaagattgattttgtaatgaaaatcctggtacaccatattcactttttttcttatctgcactcaatccaatgaaacctttatcaaaaaagtatgttgttccaaacccaatattctcattctgagcataactgttacctaattttttaaaataatttggtgtaacatccgtattgatcttttttattgtattttgcggagtattaggtatgtactctggattttttggatttatatatgtttttcctccccatatagatgtgggcttatctgtataaaaagaaaaatcgccatctgcccaatcaggattctcagtcataaatttatctatgtatggttgtgacgacttgttataaatatgttggactctactatctttttgacaggaagctgctaatgcactattgatcccacctgaatttgaaaaaatctggtcttcacataatttggctttactatttcctggaattttataagaagaaatttcatattctgaatatcttatatttgtagaccagtttttttgatcattgatgttaaaattgaacccctttacatcaaaatcattaaatcctttccgaaagacaatatctaatttgtttggcttttcttcaatttttttaggaattaaacccgattctatttgaacactcccgcctattgcatttccgccataacgaatattatctgtatttttgttcactatcactttttctataaaaattggatcgaatggtatattaatatttccactaaatgcattcattccattaataaattctccattttcaattactccaacccgatttccactcaaactacgtataactggtgcacctgcattgggtccaaatgaagtactttgtatacctgttatatttttaagagcatcacctattgtattggaactttctactttttctttgtccaccacataatttttttcctttaatgcatttgccttaaaaacaagaggctttaaaattgcaattctctcctcagcttgcacttgctgaattgctataaaaattaacggtaaagctgccaaaggtttcataatcccccccttttttaagaaaaggttatattataacataacattaaaaaaacaatccctatacatccaagcactttcatttattagtaaacagaaaatgatgattcaagttaaataagtagtttctttattcatttgatgctttttggattcttttaacagattgaaaagcttctcaactacaacagaagaaatttcattacacaatttaaggatagaagtatgtgcacaaccctaggatgaaagatagaggattatcaagctatacaataacaaacataagactactcgagctttgtagaagtatgtgaattgaagtttattaaatagccctgatcattcagggcttttttttataatgctctagcgcaaattgagacattgacattgctattgatcgtatgagctgtgcatcctgaaaatagaatgcacagcaatgtaattgttaaagctatctttgatcgtctgcaatgaaagactttcatataacaactcgattggcgatccaaccatagaaaaactgttcctggctaggattgcgttcacagatttcaatgtaacgttgcccttgcatgatattaagaacacgcaccaggactttttcgccgtcttttccacgcttggccagataagttttgagtgcattaagagttgctggaccataaattccgtcaactgttaaatctggccaacctgctttaccttggttattcagcaaatttaaagcacgctgtaagagtggttttgcaaatccggtaccgcaatttaccccagtatctaaaagctcttcagcaactaacgagctaattacattcacttgatcaaatcgcggatctgtccaatactgctttttataaatggctttggccacatcaagcggtaaatctttcatgttgcccttaaagccgttagtacgtgctactgcttcagtaataccgtactttgtttcaccgcctcgatctgctgggttgtttacgtacccgccctcacgcttaattaactcgtccagatattgttcaatgttcatttcggtttccttcagatgtaaaaaaccgcccgaaggcggcattagctgttttcaatgtcttttctggctttcttaaactctttgatcacttcaacgatcgttttaccttcctgtttatctataaaattaaaaatccaacggactaaagcccaaccgggtaaaccacaaacaaagaagaacccacctagagcaatcatcccccatacatcagtaacccattcatgaagtccccacttcacaataatgaatgagccgccagccaaacttgatacaaccgtacagatcaaaccaactgcccactcttgtggtgagcgtggcatacgagtcattaatacaactgctgcaaccaaaccgactgctaaagtcaccatgattgcaatcccatataattttaaaagtgctgtaaaaccgctagtggaaactggttccattaatttctccagaaaatttaggtaataaaaaagcacccgaattgggtgctcaaagttcttataaggtttaaagggtttgtaagattttccctccattaatcaattgagttgtcagtggtgcaactcccacaattgcaggtccacctggccccggctgaccttcagttgtgccatggtatttccagttccatgttccatcattagtagacttggtaccacgttcgccccagtttccgccatcacctgataatggggatccataacggtcattttgggttcggtagccttttccgggtaccgaagcttcggcatcagtaatttttaagacattgaagtaacttccaaaataccagcgccaatcttgtgagtcgcttgaaattggctggcctgtcatgacccgtccaaatggtgcaccagctccacccggaataccttgaacaccataagacaacccagtgtaaataccgcttggtgttgctccaccaccagatccacctcgagctagagtgccgccatcaataatcaggtttagtttgctgtgccggttcaataaaccgggtgctccctgaaacccatcacgtcgggttttagtaaagttgtaatccggatcggactcccatgcgccaaatgccaaatgaggtaaaccgccatcaccaccacgcccaacaacagcacctttaatagtcagatttaccaccagatcaggtgggaactcaccagtatcaatggcgggtagttcagtcgctgcaggggcaataaattcctgtttcggcggactggagttgtagtcgaatttatagacaaatctggtttccggtcgataagaactcgaactagaaactagtgcaccagattcaactacaaaactgatttcgccagtcgttggcaaatcccctctttgcatctgatataaacgcgccagattaatatccagctggtcatatcgaatgtaaattggagaatcatcaaccggcacgtcaataaagtctttatcgttgaggtaatagcgctcatcgtaattaattgctgtaatagtattagagaactggtcaaccggttctctttttgcaaccagataaggcaatgaacctttagtatcatcattaactactgtatagatggtatttacaaaatcatcaggacttagctttaaggccccgttcggcaaccgccctaaaaccaccttatttttggctgaacccggtgtaacaggaatcaggtccactgtgccatccgccatttgcagataaatcacatagctcttgcctgcaatgaaatctacatcatggcttaaggtgaggactaaaccttcttgctgtaccacctcaccgctttgatgaataccattgcgataatccgctacagcaatccggtcacgtaaaaccagtaattctgattctggtgccgcatcaaaggtaatggatttgcgctggaagcgcatcttgttccaaatccggtatgcattgaaatgcgcttgccacttgtttcgtacaccaacagatttcacctcttttgggtttttggctcctttatccggtaaatagatattgatacggctatcgtcggtcggatccgtgtattcatagatcagtccgtcgtagtcatccatcacgccaaaggtcaggtcatgcttgtaactatccggaatgatattcctgaagttaaacagcattaccgagttatcagttggccgttcaaaataaagcttgagcttattgttttgccgatatgcagtacaaaacaccgcatcacaaagattggtaaccagctcttcaaaagatagattcgtatcatcaatggtagtacagaactcagccgctagcggcgtaccaaaataatcaactacatcattataggtccgatagatgttttcaagatcaatctcatcgatcgaacggcggccaatcttgtcatcgagtgccatagataccaaagcatcagcaaagctagacgttggatatagctctgttgtcattgccccgtttttataagtcggcaacattcgctgaagatcaaaattgatcttgcgggacttaacagataaagctccagtggttgcataagtacgcgcacgaaaaaccgtttcatgttcatacactgtgctttgtaaaggataagcaccgtaaagcgcctgccactttacttcatcaacaactgttgtgactgtcggagtcggagttaaacggcgtgcacggacactacaacgcccctgaaacgtgaccatatcaagtgttgcaccaacggtctgacgtgactttgccgaacctttcaaaatgatctgcttcagcatcggattaccaatcgctgcaccagattcatttaccggtgttacttcaacttcaatcgtgacattaacagcggcctgatacccacctgaagaaacggtataaagtccattggtggccacaaaattacacagcacccggctacgttcaacattgtccagaatgaatggaccaatccatttttcacctattgaactgatctttggtgacaaagctgcagtttgttggttatttaactctttaagctttaaccagttagcattaacggccgccggatttgataacgtcatacggtcatcagctaccgatagaacgctataagtaccatttaaatcaaaagtctggccattaaacgtgaatgaggcattggtgatttctacgcggtcattacttacaaacttagtggttaaatctgtgttgtttgccgttgcccgaagaatctcgtttggatatgcaaaatgaaggtagttcgtaccttctaaagattgtgtatcagcaggacgtaaaacttggccattaacagaagtttgatgctgaaccgttagtggcggcgtggtaatttcggtaccaagcgagaaatatggctcacctgaaacaatatctacacctggtcgaaagacttctaccgatgcgccagcaatatcgacaatattggtttcaccgtcataagctccattgattttatagtgtccacgcccaatacagcccactacatgctcaacttcaacgttgttttcatataccttgtaaggtactgcgattaggtcgggagtattccacccagctccatagttatcagcaatacgaccattcacccggatcttgttttcccggttagaaagttcattgtttgctgaagaagactggttagtattttgagtcgtttgtgctattgatggcgttggcattaaaaatgcgatcgcaatactaatcacaatcgaaacaatagccgcgacccatttagggttctcaactacgataaaagtgcccggtaagaaatcaagctgctttaagtcatatgcattctttggtgtgacttcattcgcaaatgaaatttcggcatgatccatattgcttgtagtatgaaagatacggacatgctcaggcatatgttcatattttgaagtgagccattgcccaatggtttgagcctgctcaattgtcttttcttcagacaaagcgtcttttttataaataactttaatcataataactgacccgattaaaccccatttccatcacaacctcttcaggcaaataagtgactccgctttccatgaggtgaagaatcttttgcccacgaaaaagccccacatgcgggggcttatttctttgtctcggatggaaggcgactatgcagccttccttgggcatgggtagcggatttaaaagttttaaccgtgaagataaaaaagtaattttgcccttaggctgcataaagagttcaagcgcttcagcccgatctatgccatataggtccattgcagcttcatgaacaaagtgaacacagttgtagtgatcctcgtcatattgcctatcgagcaaatgatcatgacttttcatatagcccccttcaaaccactaaagcgatccagtgcaaaaatgtccccagttttagtggtatttaatcgtggtgattcagccttgaatgtcacagctttatggttcatggcgacacttgagagttgcagtccaagtaaataaaacattggagagttcagattgtctgaactgtaaatccggtaatttacggttggctttacatctggatattgcccttcgattacccgttcaaactcatcaggcatcacatcacctagaccagagatagaaacggttaatgtctggtccagatcaccaagcattccggatctttgtatagagactggcaagaactcataatagacctgaccggatccttccttatgttgtacatagacacctcggtcatcattacggactacccgataagtattcataaaagaaggatgtgatagctcaatacactccagttgatagacatcaactttccgattgaaaaagaacttggcatattcgttatccattagacctcccaatctttaattaatgctatatcggcattcaggttaggctggttttgaacaacttcgagctgcgcgttcacacgatataagttgccgttgacttcattggtcttgaacgagtttggaatgaaattgcatagatattgctgacgtgttccctgatcaatcaccaaatccgcataaaatgaggctggtttgttctggtagacccgccagaaagccatcattttattgaaatcggttttacttaagttccagttcacatcaacaatgtggctgttacgtttcacatcgatgtaatagcgaccacgaccgccatccatctgctgacgtttcacatcatcacccggtgttacgccatagccgctggtctgaggatttagctttaacttgtacataactttccttcaggtaataaaaaaccaccccgaaaggtggtttgatgaaataaggtttagatatttaaattaattacaaaaacgatttaacattaagaaatcgatttaataatagtttctttaccatcttcaaaaatctcttttactacaaacttgcagtaggcttcatcttgagatggttcagtcagtaaagctggattcacaaaatctttgatctgttttaaacggatcaattcataatttccatttctttccaactgatagtccatttttacatcacaactatacatagtagttgacccaataacagaagtaagcctgaaagttaacttcttatttgcgggtactttaaactcaaaaaactcttcaccattatttaaactgattgtgggtttaggcatatttaattttttgggctcatgcatagagccatactttgttaaattatttgaaatctgcttagttattaggttttttgaaattttttcaccctcattattttgataagtaatatagaactgcaccatgggaatattacttctataaacccttaaatttgcagtatttcccgaaacatcatcctgatacatatttgtggatcttacgagattatttaccgcaggaatggcacatcccgtaaggcctaaaagtgttgtagaaattacaattatttttttcatgtcttaaccatcaattttaatgccaacagactctatcaccttgaaatttaaatattatgaaaatgaaccctccgaaaagggttcaaattattaagtacgatttcttctcgctgtcgtattctcagtcaaagaccgactaatggttgagtttggatttgcgatttgatcacttacaagcttaggtaccgttcttggaagctgcttatccagttcatctttaacaatgatccggactgtttgctcgtccagttgttcggcttcaactgtcgccccactcacctgattaatcacttcaattttgaaattgattgtcggtgaagctggctcaattgaaggcatcatctcagcttgagggcgtgaagtacttcctaaagtaaagtcctgaacatcatccagatttgaacgatcctgaactaaaccattggatgagaagtagaccttgccatcatggaataagtctaaatttccagaagaagctaatttaggtgtgtctctattacccttatagataatctgagtatcttgaaccggttgattaaagatgtcagcctgcttttggctttctataaaggcactagagctcatcattgcacggcgcatgacactatctgccaaggcattgttattgagaaaagcttcagggtttgcactcttacgcattttctcgactaagccaacaccgccccagcgtttaatatcttcttgggaccagaccacctctcctttatggacaataccagcaggctgatatttcccacctgatccagtgtaaccaccgtcagcaaagccttgatctttaattgcccggatgtttgcaatgatgcttgcaccttgtgcaatagcacttgcaattaatgggatatttgctggaaaaccaacactagccgcctttgcaatactttgctgaatagaaatacctgcagctgcaatggcataagctttatcagcagcaaacatgatcttgtatgcttttgattgctcgccaaacattgaaccaaacatcgatgtgagtgaacccatcatttggccaccaagagcaatttgagcattcaatcgatcttggtgatacttatcttcaatatcctgagcattctgagcatattcggcagcgatctgattgcgttggtcctgagcagcttgaatgatagctgttttccggttttcgaagtcctgttgcttgatgagtcctgcttccatgtgtgcatttagaacatctaaaccatttttttcatcaagatcagtagcagcaaattgactatctgctaaatcatttgcagcatttaaacggctaaatcgttcctgatcctgtctgaaaaattctccggtaccattcatatccgcttggataccaccccagttttgaacagcattattcactttatcgcgtgtctctttatcctgattggctttagataatgcgattagcttttgccgctcttctatagaaagcttggtattcttaagaatttcctcccgttcgagtctgtaacgttcctgcatggcttgcgtttcagaaagcagagataaacgggcttgaaacaaccgctgttcctgagctagttttaataaccctaactcttgctgtttttgctgttccagcaattcaacagcttgcttctgctcaaacttacttaattcaaggtcatgagctgcattgaactttttacggttaaaggactcttctagtaactgttcctcggttttctggaactccttatagtcttccaatttcgttctaagggcttgtttggctatagcaatatcattatctgcacgacgatttatttccgcctttatttctgcagtacgttccgggctaaagtttgctttatcaacatcctccagtcttgcctttctattattgttaatccgtccgacttcactagccacctcattttcaagtgaccgttgcaaatcctgttgacgttcaagttgagattgaatatcaccagctgctttatcacttcctttacttgcaccacctttcaccttgctctgcatcttgggagattgatgtagaagcttaagagacactccatcctcaaagatcacttcactgacataaccacctcccttgctgtcataccatgtcttgatatctttcacagcaacattggtcgtgattggtgttccttcaggcattgaaaaatcaatacctttatgaaatgaagaagcccctttagttggggcttttcgtggaccataattagaactgatcttgtaggaagttaaaggttttcctcccgcctgtaatcgagccagatgttcattagaaactttctgacctgacaatgagccaccatatcggacgtcaagatgtggaccagtaccaataccggattgaccggaaataccgaccaagcgtttagtaagttttgcttgtttttcaatttcctgcgtctgctttcttttagcttcagttaatttatcttctcgctcctgttgttcttcgatgatcttgagatttctaagtgcgctatcaatttcatctttagacaaaattgcactcattcctttagctttttgcagttctaaaatggcattagcttgagcaacagtgtaacctttatcaagccaacctgatttatagattgaatcaataacgctatctttttgcttggcttgataatcttgcaaagccttagttgccttttctgcttcagtagcagtatttcctaaagcatccgcttgtttttgatgctgaattgccgcattttgtgcttcattacctccaagtttcacttcaactcttaataatttaagtttctcagctgataaacttgctttagatgcattgtcatcatactgcgcagcctgttttttcagattttcatatagatctgtaggcaacttaattttatttagacgttcaatggcttctgtatagctgatagttccagttctcgcttcttgggaaattttttcaacctccctatttcctcgtgcatagttctcgatatcaattaatgcagaccctacagcacgcgatgatttctctaatgctttattttgtgcattaaaagcagtagttaaatcattaactgctttagccttatcattgccagttaatttttttaactcctcatcagctttctcagcaactttagcttgttcagcaagcttttgctttgcctcctctgccttattattaaaataagaataggctgccgctaatcccattactcctaatgttgcaactccagcccacccaccaattaatccaaacgcccctttagctagtctccctgcaattgaagttgcagtatttagcttaatttgagctgctgtttgtgcatttgtagcagcagttactgctgcctgtgcttgtgcgtatcgagttgctgccgctgttgcgccaaatttagcttgggtttctgcatttgttgctcgcacattcgcgagatgagcttttgctgcattcaaagcagcggtagcttctgcatattctgcttgagcatttaatacagatgcttggcggctcgctaaagttgaagccattccctctttaatagcagcgctcttcatcaaaattgcacgagtgatatatccaataccaactactaaagccccatcagcaattaaatctaaattacttgcaagagtttgaactgatccagctaatacctgtgccgcaccacttcccttacctgcttcgccaacaaattttgtgatctcgttgtttaggagtgtgagagactgcccgattgtgatatctgttttagcaaaaagagcatcaacatcagattctacatttctaagcgcttttacaatttcttgtgaagtaatttttccttcagctgctactgaacgtaattcacctacagtaatacccatacctttagcaatagcctttgctagtgctggggtttgctccattacagaattaagttcttctccacgcaacgttccactagccaaggcctgcccgaactgaactaaagctgcatcagcagcttctgcgcttgcaccactaattgctacagctttagaaactgtttcagttaaacgtgctgtgtcatccattgtgaggtttaaagttttggcattatcactaaaacgctggtaaacctgtaacacagaatcccaagctgaataggttttttgagcaattcggaaagtgtcttccgttgctttatttagttcaacttgattgttagtgactaacttaaggcgattttgtaatccagtatatgtatccatctttgaaatggctgaacctactgttaataaaccagccatgtgtccagctaaagctctggtggctacagacaagctgtccatagacttagatgcaaattcacctttacgttcaatgctaacaagttcattgcctagattacgcgcattacgttcagcattttgcgaatcaataacaatgaccaaacgggattcttgtgccattttactttcctctaggcaataaaaaacccactcaatgagtgggtagttctttttaagttaaatataattaccaagcagggtagttaaaccaattttaaaaagcatcctagggtgcttatgcaagatattatttattctcatggtaacgaagaatactagctactttttgaaataagtagcctgcaaggaatccattaaatataattccgattcctgttgctatcataactccagaccaaaccgtttctttaccatagtaagaagctacttcaattcgaccaaatgcaagaataaataaaaaacctgcgataaagccaagagctattaacacccacccgatagcattacaaacttcactttctctcattggtttatattgtggtgcactcatcttaatctaccttgttaaagttcttcaaaactttgtaagtaatatcttgattagtggcatcaattacttccaataaagcacctttataacctatttgcttagattggcttaaatcatattcaacatcattattgaatgcaggacgtgcttgattacttgagaattcacggtacccgacattaattttatttccaaattttccactataaattaatgtttgttggaaggaattatctgatgcaattgctactgtcttcatagtagcttgatgtttatcagtacagttttttgcattaaatactgttactacacagagcttaccttcagtatctaacataactactttaaatgggtcagctaaagggtttttctgaaccatccccccaccactgacagtgttgaatggctgaaaatattgccctttttcatttttgcctgtttttaagtaaatgcctgaagtaagtgaataagcaaaactaattttaatattttcagggacgtttagaacttcacgatcaaccaccattccctgttcaagcatttgatcccctacaaatgctttattaactgatccaattggcggtttgcttatatttttaggtatagcttgataattataggctggagtagcgcaccccaccaacccaagaccaattaaacccgcagccaatatttttttcatgaatttcaccgtttgttataaagtgtactaactttaacaaactggttactaaatgtcacataaaggaaaaccacccgaaggtggtttctatcaaataaaactaactaagctatttcacaattggtttgatgccatgaatggttatttccatatgaaaaactaatttcacttggtactaaagttcgttcctgatgatttaatgactcaatcatacttcttagtttgccatcaccttgaacatgctctttatataatgcacgaagtaatagctcagtaggtttaccaattaaaccgcgatcagcttcccaatgtctaatactagtctcactgactcctaaaagcccagcaagattcttctgtgacaagtttagttctttacgtaaaaaacgaatttcctcaccattcaagtcaggcttttgcgtaattaagaacaacccaatggcattatgaagctcatgaacagattcaatagatacgagttcaccatagtcttcatcattttcaattgtaaatccattgcgcagccaaatattgctcagaccgcattcttcatagtgatacataatttagcctactctctaaatgtagtgactactactgagaattcaccgttctcgctctgcttgattgcaacagctgttgttatgtattcgcctgcagtgcgaacagaaacatttaactggcaatcaccacgagtatttgggtacggcccctcagtaatatctccatgctcaaaacagcaaataatttgcttcatagagatacagcgttctttcattctttcttttgcatgtgcagttaacttgattttgctagtatctctagcaaatgctctaagtttttgtttagcttcagttaatgttaaacacatacaagcaaacaccaaggttcttggaaagagtaaaagaatgctgaaccgtcaaatattgacggtaaggtgattattcatcatttgataatcacgcgcaacaccttaaaggtaattttctgtcaatccagatcaagtattttgtaacatcgactgcgttattttgagtcgcgtttaagagcaactgcttaattgtttgacgttttgaccaaattaggcttttcagtccctggcaatacctaatttggtcacttacctttgcttttggttgatatcttcttatggcactcctccaaaaacaaattatccaacgcaaaaatacagtcattaaaaatatgagcagccactggcaaatcattatgctcagcatagacattgatagcctgctgatctaaagataacggtatgctttgctcataacgtctggatcgacatatagtgctaaatgccgaaagaattgaatcagccgcatacgaatattctggcggatccggaatacggccgcctaagaacttgatttgctcgatttcgtgcggcgttttcgacgcatacgttttttggtatttgtagagctccatgactttcccagaattaaagccttgtccttgtctgcgtcttcctgaatcttctgggcctgttctttaatgaatagccagattgaaataccaatatcaccaagattaagaagctttgaggcattctcaggtgtatatggcttttcggactcaacagttttaccgtctacgatttcggcaaataccacacctttccagtcttcgattaagtgggccgcgcatgcatccattaaaagctcgtggtaaagcttggcatcttcatctttgaccatcacatcatagcctttagacgagatctggtttcctgcccgttcaatagctacctgaaaaggcttataagcgataccacggactttgaactcagcctgtacatcgccatcagcacccttgtattcacaccattttgatacgtctgagcttttaataattccgacttttaaagccataacaacctctaatttttagaaataaaaaagcccatgggtttccataggctttgttactgaataagttgattacacaagagcacgtacaatcgttggactggtacgcacttgggcaaaattgatatctattgtaataatgtcatcgccaccaccatcagggtgatttgcttccttaacttcaagttgcgggaagttaaacgagtacttactgcctttggtatctgtaatatcgaaggtcaatgtaaatacatcacgggttttaatagcatcaatccaagaagcagatgttgctgaaaacatgaaattagcatttacgccaatatccatcattttctctaagtaaaactcaggcgtgtacttaccagaaccgatacaacggatcgcttccagattattactaaagttgatggtaagtgtctgcagacaagctttaccctgaattgattgaccattaataagtagcttttcaacatttggcatactcaccagagggcgagtcgatgctggaataggatttgtaacaggattaacctgctgtcgcgtaaatgagctacctactaaaccaaagttaccagtgattttgcctgtggtctggatcgtcatttcacctgtattcacttgaataccacgataaataaagacttgaccaatatcttcaaagacttttaccaaggtaagagacttacgtactccaccaccaaaacttaaagcatttgcagcccagttattgaaagcgagaacatttaagaataagtcaaaggtacctagtgataattcaaactctagttgaccagttacttcggcttccgttacaacagcgccttggcgaaaacgtgaatcaactacttcactgctatcttcagtagtaacattttcagtcaaactatcagtaacacggcgaacggtgtaccagactggatttgcaggagttgttcctaaaactgcttcctcacaagcatataatcgaatttttgcgcctgaactcatttatggttctccaaaatttaggcaataaaaaacccgctgtttaagcgggttattaaagtgtttcgtctgtttctgagatttctggcggttccacgccattcatggctgcagcaactgcctgagataagttagtcggctggaaatccactggtgtttcactcaacggctcttcaggctctggttcaggttcttcatgcagacggatatcaatccagcggccttctggaatatcaagtggattttcgagatcagctacaatggctgccttttccacatcaaacttacgtttataagttttaatagaaagatcaccattttctaaggttgaatattcaactgctactaccgtattaccgttggcatccttaggtacttcgatataccaaccttcctgtgcaaagcctaaagagcccttaatcagatagtcaccagtgcctaatttgtcaaaagtgatcggttgcttggcagcatcgttatttagctcaatatgactttggaaaagcttaacgactggtgaagcggctttaataaaaccatttccatcagttgtagtattttgtgcagtcaataaattaaaccaattagaccaagtaccactattattaaatcgatacttcagggcagaatatgaggcagctttcccaagctgaaatgaatgacttccatttgtatataaacccattgagcgtcgggtacagtgtaaaaagaaaccataaggaccaatactattaccagtatcatttgttaaagtgtcatctgttcgaaaaaaaccattattaagaggagcaaccatatcagatacacgagaaccttcagcccctatcccccaatcaccgactcttagtgctcgtcccggcgtaggatcatattgacttgttgttgacgctagtacagcagcagttcctaaccccaaattcattctagctgtctgtgcattatcagctcctaatcctccctgagaaattgataaaggggttgtaagtcccttaagctcactaatatcactatttaccccacttgcagctgcgcctaggttagctcgtgcaccagccgctgtagttgcccccgttccaccttgagagatagctgcagtaccaactacttgagaaaagttgggtgccagattgggaatacctgacgcaaatggcaacataaactgccgcttgccctgtgaggcgttatatgggaatggccgatgatcccaactaaatttaaaaacaagatttgccattatgctgttactccgtcaatcacttggaaagtcaaagtttcagtgtgctgtgtagtgccactaactacagctttaatatccatctgacacagccctaaaggccaagttgcagtgcttgcactagatttaatgttcagccaccctttctgtgtgctttggcttaatgcagtacaagttaatgtggccacagtagcaccatcagccagagctttaacctgtgaagtgaaggtataacctgtaagatcaattgcacggcgcacatcatctggtggatattgcagggcttcatccatatcaactagctgaagatttaagttgaaagtgtcaccacgcttaaatacaaaattgctcataagtgattcctatagacataaaaaaaccaccgatgaggtggtagtgattaagacataaagtacctctcaaaatggaggtctcataattcaaattaattaatatctaggtttatatctcttgtttcctccactcgtaatacagtagtgcccacctctaggacccacgcaataatccaccacagcacatgaacaatcactatcgtagtaggtttttttctgttttctttcagaatgatgaggatgagattttaaggcctgataattatttgacgtggttgatcgagacttttgtttaaaacagccatccgtttcacataatagctttgttgataaccactgaggtgatgaggaatttaaggaaatacgtgcccagtttcctttcatctcataaatatcaactttttccccacgtcctaactttcctactacttgaccgtttggtttatctctaatatttaaagaattagtgttgatatattttgattcgataacttcctctactgcactctgcgcattttctgagtctgaagtttgttttggagagttatcattgcctgaaccaaaaatccctaaagctactaatcctgcggcaccccagcctaaagttgattttttcatgttttaccatttgttataaatttccattactgtaacagaatgtaatcacaaatgataatatgctgaggtcattaaaaataatcgccttgcagtagctttttcttgaactcaaagctcattatctaaatcgacacttactccagtaacaacgttatgtttaggccctccgagactaacaacattagccaagcgtatattcacatcagaaacacatagcttgttttcagattgccatttgctcaactcaacagacataacatcttcaagatgccgttccagttcttgccgtttaatttcgatttcttctaaagtcagcatacatgacatatcaattcaccttgtacccaatgctcacattatactgaatgaaatcagcatctttacccgcataaatagattggccattcaaacattctaagtgttcgattgtgaaatattcaaaatgagcaagtaatgcatcactcaattttgtgatttcaattattcctgaattgggacgtgcaaagcattgaatcatgatattaccggtacggcgagtacatggcttatctgcaatgccagaattaaaactgggaccacctgcaatcgttaagcggcaccaaacaccatctttaggtacattaaagcctggagcatttggatactgtattctgtcctgcgcaataccagtaaagctttgcatacgatcaataatagcttgccttgtttgctctaaagtcattgccatcttaaccaccgtacttttgagaaataaagttaaacgtgaggccataaataccttgtggtgcttgatcagaccagccgttttctaagcggggtgcataagctttattgttctggatataaaccaaattgcccaatttaatctttacagcttgaattgctgcatcttgaattgggtttgtttcaggttcacgcacgccgaaatcagcagatccaatcgaaacaatatgtgaagcacggtatgctccagtatcaacaggacttaaattaactaaggattgcacggtatccatgacaatattctttacatgtgcttctgctgctttagacacatcaagactaaaactagtcggctttttccccttccaccccatgacttttaacctcgctttcctcatacatcttaaagagatcctgagcgatcgcctgaattgaataagcttcaaactcagagctcggttctcgttcacccatgagctttttaatcttttgccagacatgaacagcttcatgtaaaagcaatccatacacttcaatctgatttctttctgaagtatcaccaagctgaacaactgcatatgcaccttcggaatagaaatcaacctgagctgcagccccttcaatagacaagaattgatcgaccttattcatgtcctcaaatagcaaatccatatgcagttgatttcgaactaatgtgtaatgcacatgctgaaatggtgagataagccacaaaggaacgtagtttgtatttaccattcaaactcctaaattgcgcccattaaaaaacccaccgaagtgggttttaatttatgcaactgagcacttttctaattttaaagaccagtcttctccaaatcttcgattaagatagttagtaatttcttcttcgtattttggaaatgttgcctcagttactactacagcatttcgaccacctgtaactccatatcggtcaaagccattttcagcatctctagaagttgtattatttgaaagataaacttttgccttaccatctttaattagactagctttgcctcttacatttgggcatttcttttctgggatttcaatgacgattacatatgcttgagttgccataatttaattacaccttctcaattatgaaatcaacgccagttgtcattccaccactaaaactatgggcagttaacttagcagactcttcatcatctatttgaccaaattctacagctttttcttttgaatctgttgtagtaagcaatccctcattgtctggaattaaatatttaccagaatcggttaacttaacgatataccccataatttccccaagaaagtattttaaaaataggtatatagcttaaatcaactaaattaatcaatacaagcttataccttcctcaactgacatttccaaatagtagaagctggatcctgttgaatatgaattacccggaatgagcctaaggctgttaaccactcatcatcaatctttggctctttggtaacttcattctgcagcactgtagcctttttatctgtggccagtactccaagcgtctgaatctcatattgactgtatgagccaaacagaacgccacgaccagaatagttttctttaacttcgacataagtttcagttttaggatcccaatcttttcttgagatccggtcacaagtaaatgaatgaacggcgtccgctaaatcatcattaaatgcttcagcaatatctgcctgaatttcttcacgtaagcccatttaaattttcctgacaaaaaatacagcttttcgtttgctgtaaggcttaatcaaatcaagaatgaattgttcgattgcactaagctttactgatccgtcctgatattccttttcggtctcaaccgtatcagctttgaccttcttacgttttagtgcctgttcctgcccttgatatagatcacctttcataatgcccttgatgatttgataggaggccgtttttaaaggttcaggtacttgggtagcatcttcataaggcttaacgttacgtgctaatagatatgcttcggccatttggaggtattgagccttatcactggcagataaagcatcaaagccttcaacatgttctatcgcttcttgttcagtgataaagctcatgaattattcctttggaattaatgctaaaagttcatcttttttagcacctgcttcaaatgcaatgcctttttcagttagtacagctcgaagctcatctacttttagaccagcatagttaattggttgtggttgagtatcacttggtttttggtcatcttcaggtgtttgaccaccttcacctgattcaagttcagcaatacgtgctttcattgcttcggtatcattttgaaaggcaataaattcgccctttactgttgccagttgttcttcgagttcagcaatttttgtttctgtcatttgttgtctttcccgtgcacggttaaatgatgaaagtcccatatgtggatctccaaaaagataaggcggtgttacccgcctttttgttatttgatcttgtgcttgaatgccacaatacggatctgtttaggatcgtagacacgttcccagtttgcggctgttgctagaccagcattattaggtgcaatacctgtatcacctgcccacttaatgccacgaggatgcaatacaaagtgacggcggttaataagaatatctgtacctgctaggctgtctcggtcagtctctacaccaactggtgcaccaatatcttggaaaccaatcgcaccttggccaaacaagaaagaggtaaatacatcaccatccactggcataccgtcatcgacaatcacacggcgatccataaaagttttgtaaagcaccacaccatcagcatcacgcacagtttcaattaaaccttgcttggctagtgctgccattgtgaatgagtgcattgaaatcgctgttaatttatcaacagcatctcccaatttataagatgcatcgataaatgaatgaccatcaattacggctgctgctccagtaccagccgaaatgtcatgggtattacctgccatgcttgcagacccaaatacacctttaagtgtatttacggtaaacccctgaaattcacgagcccagtaatctgctacaagatcagcaatcgcacccaatgggtcatcaccagataatgctttagataaatcatttgcaccccaagccttaccacgggcatgcaaaatagcaatatctttaccagccgtgatgttatttaccccaagagctttaccatctgaaagtacttcggactcaccgcttaaatcattccagaaaggaatatttactgtggtaccgccttctgtaccaaaagcgactttttcatcaagctccccaacaatgcctgactgccataatgcagacttctcggcagtcttatttaatacgtacggagtaaataactcaggtacgattacatcagcaatttttgtctcagccattaggctttactccttaaagtttaataccgtgttttgccgctagctctttagctagttgcgggttttcatttcgtaattgcgccaatttggtcatatttaccgagccatctgctttgagaatgtctggctgaccttttgaattgttgctaccaggtgcgcccatgccattaggtttaggccagtaatacggtttttgctcgcgtagagattcaacccattcttttggggtcatcggtgtttggccgtctttaccaatgactacttccccgttttcatcaactgccacagctttgccgttttcatctaatgcaaactttgactgagctaaaaaggcgatatcaggggtcgcttctggcaatgcttcaagttcaattgcagcctgcacaatttggctttgaattactgattgcttgaacttttgagcataagcttcggctttatcggcacgttctttttcggccttcagtaacttttcatgctcttcacgcatcttctcggtgcgcttctgaatcacttcgttaaccttgccttctgcgattaatttggcctcttcatcctggtcaatttgagcaaagactttcttaacaatttcaggatcaattccttcaaattgtttctgaagtttttgaagttccaactttgcattcttagcagcatctcgctcgctttgaagtgcagatttcaaaccttttggatcttcataaccttctaagtcgaggcgaaacttcccgttttcctcgacatataaagctcggtgttcttctttgattgcatcaagtgaatcaacaataaatggcaatgacatgttcaaacctctcgtttgattgggtaaagacttatctcaaggcattaaaaaagcgcccctaaggacgctaaatttcgattgaaaacttagtaatttgttgcaaataaacggtagccttctagctcccaaagtttattttcagctgacttttctgcatttccacgagccatacgctcaccaatttcagcatcaaagttttcagcattcacacatgcactaaaacccgttgctaggaaaaactttccatctaaaaatgcatggacaaaagtagatgtcgtgccaccggggcgttgctcaaccgtatatgtaacacgctccatcaatgaatcaatttgcgctttagttactcggggtgccacagacttttcagctaactcttgctctgttacttctttgatcattttcttctcacaaaaaaagcacccgaaggtgctaaggttaaaaattaagttctaattgatgagtgcaatcgcttttaatctttcaaaagtaaaaccataaattgccatggctcttgaaatcttaatttgaagaaatggcaccagaattaattttgtgctcagaatatattgagcatccgacatattgatttgcttttcagacatttgtagtacctttcgctacatttgctttgtttgagtcggccttggttcatcagtcagtaagcgaacaccatgagcaccatatgcttcaaaagttacagtaattgttgcaggtccatttaaggcatcagaattcatctgtactgctctttgtccagctagtggttgtccagtttcttcatcacaaataaccagataacctttcaaagtagggtgacgctttagcactaaatgtcttgactcactcataagcccaactccttaaaggtttgctcatccaactttcgaagttggtccaatgtatataaccgcccctctggatcgaagaacttatcaaaatcaaattttccttccttatagagcttgtaacgtttcggccccaaccattctctttgaaagaaatcatctgtcttcttgaagaactctctaaacgtagtattggcatctagctgccctattaactggctacgctcttctttcgggatgtctttaactcgacgttcgtccataacaaatggccgttcaccaactaatttcccgtctttctctacaggtaccagaatacttcggcaattaggatgcaacggcggtacgcgctttgccggatcgttaatctcccatacggaaccatcaagagttgcgcaaagttttgaagttcttccgtctaaagttgctaccagtcttacgtattcaaagccaatctggttaaagctattgagataagcttgattggctacatgactacgaactgttctcaccgtacggtcgatatcagtcttactgctacttagaagcccatcctcataattaagccgcttggtgccgcgaatgcgctgaactatttcctgatttgttttacctgagttgataccatcccgaatggcatactcaactttttggcgtgcagtttcagcaatcttagaaagcagctcatcaaccagtgctcctcccaccaacggtacttttttagctgctgcataaagcttttcaccatttggctttttgatcttgccgccatatagcttcgccgtataattggcttcatatactgccaaggcagtagcagaaactgcgaaagcttcaggtaatgcagtatttagtcctataaaccactgagcaatcagatcacgaatttctttaagattagttgtagtgtactgtccacttgctagagccatcttttcagaatcatttaattcatcaagcaaatcccgaagctttgccaacattaatattgactcatcattaaagatttttagtagctcattaacagattgagaagacacccgatataagtacgcctgatgttgggtaagtacttcaatcaatgatttatcttcttttgaagccatacgtcacctctacaacggcatactgtcccgttcaccttcaacccgcttcacttcttcctgatagtcgtgagctggtaatttacctgtcatcaggtattcccaatatgtgcggaaagagttctttccggcaatagcaccttcataaagttgtttggccagattgatatcgtattgctgaacgataaattcaggttcaaccgtaaatgcatattttgttgaatccagctttaaccactgagctgcatatttgatagcttgttcaatagctgcagcagcacaagtgacaatgctatgtaggcttgcttgttggtcatcctgacgcgcacgtcgtgcttcacctgattcttgtgagttggtatcaatcacctttgctccagcttctaatgccgaattcttttgagcatccatttcctttttagtgagttcaatgccactacctgaaatttcgagataaccacactgagattcactaggaaggctccagacagccatcacaccagtaacgctaatatcttcatcaccctcaagtccattaatccaaggctgcggatgagctgtatggtgaagtgactggtaataatccgcacttagctggtaatacttgagtgctgccttggccatggtaagcaatggtaccgttccaacttgtggagaattatcggtcgttccacagaaaacaaacggcgtgaaagatagctgattaccgccgagatctggcgttttatcttcttcaacagagccatcaaataaccgtacagttagcgcaccatcaaccatagataaaacacggtgaaccgtctttgtatcatgcccaaactcatcttcactattttcgaattgttcctcgagcactaacagctttagatccttacggccaccaatgctgttttccttccagttaatgattgatagcgcatcatatagagcgaaatatggcacaccagccccatcaacatcgacaagcaaaccacagcgcccaaactctagcaactctgaacaaatgcgaataaagagctgtttaagcccaaaaccatcattggttgcattctctatcaaaccctttaacagagaactttcaattacgatgttaggttccagctttgaaactaaaccaatcatcgtgcgtaatgcgtcctgaacccatagcggatactgagctcgacttagataggccttataaatctctccagtcgtatcaccttgcttttcagcctcaatcattccggccgatttagctaggtactttgtttgtgcctgtttgatctgctcttcaccagcaacggcgtcccgcataatctcccagcttttttgtgcagcaatatactgcggatgtttatcagtaactgccataaaaacaccaataaaaaagcacctgagaaggtgcattgattaacgagaaaaaccagcgattgcgcgccgtttaaatattttctgaatgatgactgggaatctcttagctattggatatccaccagcgtccccaacgtggtccaaaccagcgcttttatctggcattccaaaatcatcatagacttgctgttctaaagtagccgtaaagttaggacacttgtttgtgttcactttaagtgtcgttcaccctcagcattcagaatttgtgcattaactgcagtgatacgatctttaataccgggattcacaccattaacttcaactttgaatccatttttctttaagattgcatgatcagattcactgaagttctttgatgatgttgcctgacctgaagcatctggaatcacagtaatatcgtgatctggaaagcgctcattaatcagttgacacatcgtcggtgtatctctcacgccaaccagttcatctaaagctcttggcttcccttctctaatgacataaaccacagcagccattttaagcacgttaaaatccataccaatgagtaaaggctcacctttcttaatttcttcatccgtgtggtttagaactcgatcaaagtcggggtaaacagcaccactggttaaattgacaaactgccctcttaaataagctgaaattaattgcggcggataagactcataaagtgatgatatgtagtcatctggaagattagcttcattgtcataagttgaagcttgaatcattccatagagcttacgcttagcctctgatttatttgcctctttaacaaattgctcgtatgtaaacttaaaaccttctggtgttgtggccacatcaataccgttgagcaaaccagcttgcttataacgcatacgagcgatgatcttacgccaagcctgttgagctttgaccttggccataacatcaagctcatcaatcaaggcgtggccaattttaaaacctacaatggttgctggtttctccatagaccggcaaatgattgtagttcgatattgccgaccataatagatatccacctctttattggtttcataaaccttagttttaagcccccaatcgaaagcaacctcttcaatagttggaaagaaaatgtcgcgaatctgcgggtaagttggagcaaaataacccaaaggtacttttgggaattcccaagctttgttgcataaactggagcatccaacccaagtctttcccgatccaaagccagcgacaaatgcgcggaacttcttttccatctgcaaaaaattagcctgaggtacattcagtgtcggattgatgttcggcatcttttttactcgcatctacaacttgaatagttaccttgactggtgttggatcttcatcaccttcaccctctcttaacttttcaatctcaagttgctttaactcaagatttaaaagcatgaggtcataaccctgcatttcttccctaacctgtttaataaccccttgcttcataagcctgttgttcttccagtcttcatagatcttctgaagttctttaagccgataggctttattagctaaagggatgtcataaacattctttttaaagtcctctcgggttttatgaaaaaggtctttatatttcttacttaaattctttcctgccgcttttgtcgggtcataaagttgtacctgttttcgatcaatctcaatgttaaattcttgcttgacagcattagctacctgttgaggggtatccatgcaggcaagcgcttgaacaataaatatttttacctgttctttaagtgcagccatacccccacctttgtctagctacgtctagcaaagaaggcaaaaaaaagagccattcggctcagttgattacgcagtttccgcagcattttgaaatatcaagtttcgaaacaaacggcggattctttgcagcttcaacgatacgtttaacgctttgactcgccccccaccgtttggttacaccaacaaactcttcgacatcgtgaccagctaaataatgtttaggtaaacctgttgagctactaaagatcatttcaccgtcttcatcacgttctacgcctatatggtagagttcatgctcaagcaaagcacaaaactcacgatcatttgctttgtcgcaaaatgtagcatcaatggtgatcaagtatgttggcacaaagccgaaccagtctcgcatctgttgctcttgtctggccttacgccatccaccaacattgaacatgactttttcgcactgacctaacaccatagcttgcttgcttttatatgcagaagaggcccaagcacatgctaaaaattcttcattatcgtgaagcagctcagctatgtgatcatgatcgggattataaagaggtccaccaatagttaagtaattagcaacaacccatttttttagatctggtgctggtgttagtcttattgcttcttcttcatctgcttgatcaataaaatcagtcggtggaaatggtctgatctgctccatcttcaattctcgctaattcgtcttttatccagttaatgacatatcccgacaaaacagagtctggatgaaagcgctctattttgtaacccatctcttcagcatgatcatatcgatcaagactccatgctttatttgacagttttccactacgcccaccagaccaggaaccgccctcaatttcaatgagcaaacgcaatttcacaatatgaaagtcaaagcgccagtgtttggtatggatcggctgaaacttctgttcaaatccaatcgacaaatcctcaagctcttccttaagtgttgcctcagcctcgagatatttttgtgtaggctttggcagtggccggcttttaggtttagttttaggttcttttttccgagtaagccaaaagtattctgtagaatccattattcttacccataaaaaaaccgccctaaggcggtggctaaaaatagagacaactaactattatttcttaaaagttgccttataaagctttgaattaaagtaatccgtaatttctttaccttcggtttgaattttttcctcatttaaaggtaaaaaatctaattcatatttcaagctcatatactctggaataaatttctttataggcggaggtggtttaggtccaccttctgtaattttttcgataaatccagctaaccataaaatatactcaccttctgaattatgaggaggaatcaaactcacatctatttttactttacattcatctaattgtttactaaacaattcaacaaaatcaataaaattatattttaatttaaattctgttccctcaatttctctgcgtatacatgtcataagtaagttcatattttcaatacagtcatgtgaaaacaattcctcatctttaattttgttataaatattttccgcaaacatgagatactgtggcatttcggcagctcctcatttttataaagtatttttcttaaggtagtcctattataacaatgttgcaacaagaaattttccatttttagtttaaggaaattttaaaaattataaaaacgattatattcaataaattagtacgaataaaagctagggaaagtttgatttttctattgagctttaaaatggattattgtgtttaaattatcaatttaaaaagcttgcctagtaggcaagctcccccttttttgatatttgcgctgatcaataaggtttagggttacttaaagcaacacactgataatactgaaatattcaaaaataaaaaagcccacttcctatttttattcagaaatgggcttagcgaaaaaaaacgcttagacctgaaataggaaatatctattcggaaatatctccaacttcatattggcataatatttaagcactagcaatagggattgaattaaaaatatcaaatattcatatttaaatagataaagatttctttttttaaatggttttatttttagcctacataatttttttacttatcaagacttataaagaatatgtgcccatcaataggtaatacttaataaggtcttatgtgtagtaaccattaggctctagagagtaagaaatcacactgactaaaaataaaaaataattaattttcaatatcaatgatcatatactgcaaagttaagtatattccaacttctccattgttgagtgcctcatataagtcttcatcaacaaaatctccagattcatcatctagccatttatgaatttgaataatttgtatattcccttttttgtctattcttgctattgggtctattacggaccgaactatcaccttcttcttcgtctcaacatcaagcaatgtgataattgtcattttaaaatccttataaatatcctgtataacaactacgctcaatcaataaagatttttatatttaaattactccaatagcaatcttttcaatctaaaaaataaataaaaaacactttaatagtatgtgcctattagaaaagataccttaaatattctactagcaataaaaaaccgctttaagggctgttcatctaaaattcacaggtacttaatgaagtttttttttctgtctttgcatctttctgggctcacaaatttttccaataaagttagttaaccacaaaatactttcttcacgatcttcaaaatgaggtataagacttaaatctacttttatcttgcgatcagctaaaggcaaacttaaacaatgttcaaagtctattgagctgtacttcaatttgagtcttttttctgcagcttgattctttatctcagccataatgcgatttagattaacgatcaaattatttgaaattttattattttcatatacccgttcgtaaactgtctcagctacatcaatgtaatttattagctctacattcttattcacgacatttgtactccgttttttataattatccgtctaaaataatgtttatttgatttactaaatccttcgcctaggtaaagattgtttaaattctgtcaccctgattttaagtaaatatttgaatttattatgcaattactgagttttataatatttatatacatctttgttcttaacgccccttttttctatcacttgcccattgagttcaccatcaacgcaaataaacattgtactaatccataaaattatggagatcagcttaacacaaaaagaaaaagcccccactaatcaatagtgaggctttgccgtatttcccggctagcacatttaaaaatcgatagctaaaaaaaagccaacttgttagagtcagcttaattcaatcgtttgagaatcatgcttgcatagttattgtccgttgcaatcttctatcatttttatttttataaatataatttaaaccagccatgtgacattttgattaaatttcactcaacactttttttgttaaataagtcacatttaatcttattaatgcactaaccattacaacctataaacacaatgtgtatcaattacttctgcttgattttgtaaattacagtatccttagtttacctaactgccaaaatcaataacacaatggaacaccaaacacttttagacgaattaaattcgcagattgaatattactcaaaaagaactgactgcccaccaactagaattcgtattgggtataaaacctattacgaattaatgcagaatcctaaatttgccgatgaagtatcaaactccgctttagatccaaacaaacgcaaatacaaaaaattaaaaataaaagttactaaggatgacaatcaacttgaacttgaatgatttctcataaaaaagcctactctttcaagtaggctttccccttatgacttttgcgctgatcattaaggtttattgttgtttaaagcaacactcagatcttacagaaatacttaacaataaaatagccccgccaataatcgatatttagcagagcttcttaaagcttatacagtttatcgtggaagatatctttttgaacctgtgctattaaggcagtaatgtccacctctaggcccaacacaataagttccagatgtgcagtaacaagagttattagtcgttttactataacttcttggagtccgtgtagtagcagaacttctagttctagtattattatagccttttgattctctttgaggagttgagtaaacaggctgcctgttatcaaaactcccttttgaatatctataggtgactggtggagtataacaaccagcaaaactgcacaaatatttagtatcaatccattgttgtctatccatatttggatttaataacgcccattcatcttggtaccagaatacataaacttcacttccccctttcaatttaaagatttctttgccatttggcatatccttgactggagcggtatcaacactaatccaatttttaactggattaaacctttcaactttttgctgcgaaaagtctatggacggtatagatacacatccactaatacccaaagtaataactaaccctattaaataatttttcattttattaacttcttagaaagaataattttaatgcgaagtaaacaataagctacctaataaaagcaacatatactttcatctaatttaaatacataaagaaaaattaaaaaacccgcttctaaaaagaaacgggtcaaaaaacaaaaaactttcagcgcagtatttgtgacatatcatacaagttagaagatgtatttacaatatactttaagcttaattttttgatgctctcaaaatatccaaaactcgctttgacatttcatgcaagttggaccctattggtagccaaaaatgataattaatgttgtcacggttaaaaacttgcttgtagtactcagttttgaatgatggatcaatgtcagaagccttaagtaatctgccttctttttcgatcacttgcccatctaattcaccaccaacacagatattcatttttaccagcctggactatatagcaaaaaataaaaaaaatccgtaccttggggaaagtacggactaagcttttcaactgaaaaacactataatggaaatagacatcatatagtaagtttaatatacgataaatttcatgttttttcaaatcctaattaaaagcccacgattaagtgagcttttaaaacaaattggtgcaacgcttataactttgtccactatatcaaaaatatgccataaagcgtctagacagtcaacaagtctaaattatgcttttctactaattgagaagcttttaaacgttcaacgattttaatcattagatcattggcagttataacgtcgattccttcaaatgcttttagtgttaattgcaatttattattaattacatttgtaattattgatattttaccaaaataatcagggtagtatttcaaagtttcattaactttctcccgactaacgccttcatatagttttacagtgtatgttttcatttgaacctccattttgtcttaatcttttatcatgacctaataaataaaatctagcgcaactcaccataattgcgacctgagctttagattggtttgtttcttgagcaaccttcaacaatcctttattttcaaccttatttttaattaaacaaattaatgcaaacttagttgtaaaatctgttttatcagaatttaatagacttcgtaaaagtgcttgaatttgatccgcctcataatcactgatctcacatcgaatataagatttacttttttgtacttctttgccagcttcacgcatcaaccagtaaatttgattgatatgaagcccatctggcaaatcaccccctttcattctaactgtttcacaccatgcgccaaactgctctaaccaaccgtcaatagtatatttagaccaatccatttgttgtgtttttaaaactgcactcatttttcacctaccaattgctcaatttgtttaatcgccacgcctgctttcacttgctctgtgctgaaccgtaaaactgtaaaacccatcattgctgcggagttgtatttctccatatcccctatatagcctttgccccttgtatgacggcctccactccagatcccgccttcaacctcaatcaaaatttttgtaccaataatcagaaaatcagctctccatttgcgttttggatggaacttatattcctgttcaaaaccgatcttgcatgctcttaaatgcgttgccagaaccatttcacccacacttggttgtctggcaacttgctttgctgaacgccgctttttatttttctttatcggaaataacttgcggtattcagcaatgctgactgatgacatcaagcaccacctttcagcaaatttttcaactgattagcaaagcagttataaactcgtgctttatcttgatcgccaaaaaggcttgaagcatgagcatcgtgtttatacttttgaactaggttttcaattgaacttcttagctcaactaaattcgcttgttgttctttttgaatctcccaagcccactttccagatttaccctcaaactcactcatgactggctccttttcctctggcaacttagtcataacaccatctggaaatttaaaatctccatgccacttcccgttttcccaaatagaccaaatcccacattcatcactgttgtagtaatatccagcctgccaatgtgtcgcacctttagggcggcgttttaatatttgttcaaacataaccgcctccgtatattgattcgtaatcagcaattgcttgaagcaacttgtatccagccgattcaggcctgtttttgcaatgagacaagtcatatagctttacatcatcaatgccgccccatgattcgaccaaatcaaccgactccactagacgcttaagttcagaaaggtctacaaaatatttttctcggtcagccttgctaatctctacactttgaccacattggaactcgaaaccttcattccactcagttgcgttagaaggtgctgaatcaacgatttctttcgcgtattgcagccctttatctctaattaatttggatgctttcatacattcgccccttcaattagctgaagaatatttctaggtattggcataccctcccgacggcacatctctgcatattcatatggattatcaaaaggatctggacctaattcttttgcaagttcaggctctttttcttttgcctgaagtttttgtactggtgctggtttacggccattaatctttaaccgttccatcaaagatttgagatgcttttgcgcttcctcattggaaactggtatatgcactttctgctcatttttctgagctaataaaattggttcttggtaccaagcttgggttttacccttcagttgtgcttcagccttgtattcatcatagatcttgataaattccattttggctttgtacatttcaccgtcttggattagtaaataaacttggtctaaaacaaatttggtcaaggttgtaatttcttggttctgctctcttccgtctggcaatgtcacttttttgtgttgagagatctgagtgtattcacaagccttaacccaagccttctcagcgctccaccaatcatcacccatgcacatagcacggaattcagcgaagttaggcatgtatgtatttgtacttgcgtaaaatagcgctaagcctctttgaagttggttaggtgtaaccccaaccaatgctttagcaagctgctgttcaacgatttgcattggaacggcatttttcccctctactggaaaattcttattgaactgaacagcgtatttagttctgtaagccgcaattagttctttcaaaaaactttcaaatggtgctaattcattcatgattaatagcctccaaaatcttgtgacactggcgtaacgtcaatcacgtttgaacggttgctctcagcgtacatttgagtgaaataacccggttcttcaggaacgttatgagattgtgggttttcctgaatttgattttggcgaggctcaaatacaccctgataatttccgataattgagttttccagtgattggttagccaaaggtccaaacgagataagttttttaaggattagctttactgcgttttcagaaagtggttttttgatgctgatacgcatatcaacaaaattgttccacagttctgaatctacacatgcaggtagttcaactgaacgtggattaaattcatttggtttttctgttttaggtttttcagaaacagaccctctttttttatttatttttttattactttgagagttgtttttgatagtgatactttgtgtgttaaaaatttttactagtagcggtaaaaaatttttactagtgtagttaaaatttttaactagaagtggtaaagaatttttactagtttggccataaatttcaggtagtaaaaaatttttactagggaatttaagcactaaaccaacgctagtatcgttacctaatttgaatgtatttccatgaattgtgcttggttgttccacgactaaaccaactttaattaattcattaaggcatttaacaactgtcggtctactcttccctgtaatctcttcaaattgagttaaagagatggaatccatctccttattccagccacgagttttacggcaaataactaaataaattttgcatgcagcatcagagattttatttaaaacctcgtcaacaaatgcattaggcacttgaaaggaattaggcacaaaattactcatgtacaccgaccttaggctttacatacccaccaaatttttgaaccaagtcagcattagccaaactattaacgatctgccctgctaaccactgattagtgcgaaaacgctgtgccatagtttgtgaaaattcttcacgcgttattgcagcattattttcgtcataacctttggctcttagatttttacggttacgatcatgtagctcattgagaatcactaacgctggatcaaagaaggactgaatttcctgaatctgtttgtactcaggtttatacttaaattaactattcatgacacctccgctaatgcttgctctgcgcttgttagccggcgtttggcgttgagctctgctactgttgctgtacggatttcttttgatgaaaccagaatcaaatgattctccgatttgatagtccacaacctagtcaaagttttgtttttaacttcaaacaaatcatttgatttgaaagtacggcactctttagtaagcactacaacgtcacccactaaaaattctggctggttgcgttcggttgtttgatttgataaattgttttgcatattcatgggttcctaaatttgtgaatgcgaaaccactcctgttacagcaggtagtggttttttatttgaataaaatccgcatgtattcaggtgaagtgaatgcatgtgctaaataaactcgcgttgcttctgcaatttcaggtgagcaatacacatcactttcttgcacaaccttcaaaccaatggctgtcaacaaaaagctaataaactcaatctcagtccatccatttgatttcttttctgttttcatccgtgaaaggatgcttgcatcgacatttatcatctctgctacttgtctttgattgctagcgttaagtgcttgcaatatgagcgattcgttattgctagcgcttgcaggcaattcatttaatactttgctcatggtttagttcctaagcggttaatgcttgtaaatcggctttaagtttgcctttggttttgacttgcaggactgcttgagttctggctggtataccgttgttttcccacttccagagggtcacggttgaatatccagttttttcagacaactctttccgatttttgcagccgtggtatgtcatgaggtcactaattttcatggttacaccaagttaactatagttaataaaccaaatttaccacttgttaaccatagtttcaatagatcgtattaacattagttaatgtttttggaatatttgttatgtctttacacactcgaattaggcaaaaacttgaagaaaaaaaattaagagccgctgatttagcaagagcaactaaaaaatctcctgttgcagcaaagaaatggctagatggaactagcgtacctacagcagaaaatttgaaagtcattgcgaaatttttaggtgtgagtgacgattggttgctttatggtggatcggatgaacaagaatcgagtaacaatttagctcaattaaatgttattgatattgaagcatttaagcagaagtacaatattccagatagtgaagatgccgttaagtttgttcaagcgccagctaagcctttccctatacaaaaaagatatgttccagttaaagcctattcaaaaatgggaatggatgggtatttcacagatatgggatacgatggaaatgctggggatggctatgttccaactcatacagcaggtccacgagcctatggcattaaaggcactggcgactcaatgtttccagcaattcgtaatggctggtatgttgtatgcgaccctgatgcagatcttgtgccgaatgagtttgttcaggtgtgcttgaaggatggaagatgcacaattaaagaatttgtcggcatcaatggtggggttttaagtttgctttctgtgaatggtggtgagcgatttttctttgaaatggacgaagttgaaagtattaccgctattacagatatcgtgccgccaagtcagcacagacaagaacatccttattcgcattaatcacaggaagacttatggacaattcaaaacgaccaatcaaccagattattgctcgcatcaatgatgctgcgaaacatggtgaagctttggtgctaacagccgaagaagtgaagatcctctcaaaggacattggtgataaagtctttattccagtccttacaaatgaacaagtagtgcagttggtaaaagaaggaaagcttgggcagaaaattaacaacaccaaagattaataagttgtgaacccgacacagtactttagagcgattcgggaggaggaaataatgagtaaaacagtagtaaaagacaaaacagtacactacaaaaaagtagattttctaaaaggcgccaatctaggtcaattactaaaagcacaattgctggataaggattctttttactataaagccataaatcgtcaacaatttgtctccgcaacaaaagatgattttattctaattaatcatgctagttcacaccaaagcatgttctttggcgagttgattattgttgagtcaggcaaagctcaggctgtattaaagatagacagtgatgatgctactgaatttcccattaaaacctatttaacagatgatctgccagatgatgaagatggcgttgacgctacagaggttgtaagaaaagagtttattgatagtgttctttactttggtgttattgataaccatgtcgcaatcattcaatcaagatcacttaccgctagaaccttggagtcatatttgggctggcttttgggtgaagcagccaaagcattgccagagaatagtgcattaatattaaaagatgctccaaatcccactgttaagcaaaagcttgaatcaactccagctaaaactatttcaatctcatctggcattgggtcaacagaacttcaacctgttcatactgtcgaatcaagcatacctgcgaaaattgactataaaattgaagataatgtggttgatgtgcttaagtcagcttttggagttgatttagaaaatttaaaactagaggatgggcttgatgacgcaaacctaaagttaaaattaacacttacatacaaccgcaaaacctcaaaaagtgggcaaaaagttattgatactgtagcttcatccatgcgacataatgatgattatgttattactcttgaggatgggaccaaggttacggctgataatctaaaaatgagcggcaagatttcagttgaaacaatcaataataaagtttataacgacggcctaaaagttcaattgtataattggatgactaccaatataaattttggtgactaatatggctaaacgctacttacccttctacaataatgctagatttatcgcactagtgttagtcggtctgtttgctatattttcaataatttttaaatatttagagttaaatattacaataaatctggttcaattttcatttgtactgcttctccctttaagtcaaatttatttggcttataaaggtatgctcgatgcattaaagcttgatggtttaaatcagtcagaacgagataggttgacttcaactgtggacataagaagtaagtcatctttatatgtggctatgctttttattattcttgtttttagtatgtatatacttaatttattaggcttactttcagctaagcatcttttagctctaatactttctgttggactcacctcaatttttagcttcttcttagcttggtctgacttaagagaaatctctttgcttgaaaaaacattaaaagatcgcaaagaatcaagagaggcaaaagcaaaagtattgagcaataagtaaaaagcgatccaattcatctaatctacccaccaccacggtgggttttcttttttaatatattcaaattttccctgatattatgggattaagactttgtgccaacattgatcttaaataaccattaatatcggagaaaatatgaaaactgaaatcatagaagctctagcgttagagcttactaaggcaaccattgctgatactgatccttcaaccatcaatataaaaagtgctgatctttgggttaaaacctaccaggaatcactgaaagcggtagaagaagctttaaaagaacttaagccaaagcctaaagccacatcaaaacccatttcaggaatgagctaaccctgattactcacactctactatacttaccttgcagttattcttggtggcaaagtcatcaagaatagctttcagcgcatacgcgttccgaagcgtgcactctattttgaaagcggctgtgcaatcaccaaaaagaatcttttcagcacgatcaactttttcttctagttgatcaatattactttcctgaagcagtagtttctcaaccatctgcttgcgccattcaaacatttcttcgcctagactcatttctatcacctttgatagttgggttttcttttgtctattaaagcatgaattatagttaataaaaagattaaccattgttaacttttctcttgactaaaaaattaaccatagttaatataaatctcgtagacaacaaaaaagcacatcgactctcttaccttccgatgtgcttttgcaaactgcgagatcaattatgaacgtaaaagctacccctttcaactcatttgcatttgtcagcatggctgctcttgcaatctctggtggttctttagttgcttgccaattgcaaccagctttccaaacaaaagacgcacctactctttttacacctaaaactcaaccaagtacttacagcgtgttaaccgcaaaaatcacaggtaagcattctggagttgctgtaattaaattagatagcttccgtttaaacgttagctttgattttgaagctcatccagacagctacggcgttccgggttctgaattcaccactgttgatattacccaactcacagtaaatgaaatcactgacattaatggtaagtcatataacgatttcaccgaatttgaagacatccgcaacatcaatagccttctaaaaggcttcatcgaacgtaacaagttggtggaggcagcctaatgaaagattacaactgccctacttgcaagaagatgattcctgttgaccgttcaaaaatcaaagctggtgatgaggtttcattttgcagagtaacccaatcttctaaatctgctcgtttttcttcaaaagaaggaattgtcgattgccgtgaaggtgatgtggttttagttaaatatcgcaaagaaattattcctttaaatattaaggacgtctcacctgtagatgctcctagcccgcttacgtatgcctttgttggtgcatgcgaatgtaaggaggctgaacatgtctaatttcaaaaagcaccctgacggctataagtcttttttaggtcgtgatgataaagggctgtattcagttcgcatcggctggcaagtgtacgcatctaatgctaatggctcagttctttacaaagttaaagacggatttaagacgcctttaaatgtgttcaggttccaaactgactatccaaaagtttggaatgaactcacacaagaaattgattttcagcgcagaaagcagctcgctataaaactgcgtgaaacaaatatccctacctatgaccgcaaagcttataaaactaagcgcggcttcactggctcaagataaggataataaaaatggctctaccgattattactgctgaccaaactttattagttcaagcaattattgtgtacctatacgctgatccgggtttaggtaaatcatcgatgggctttactgcggaaaaagcaatttcttttgactttgaccgtggtgctcaccgtactggtgaattacgtcgaggtgcggttgtacaggttcaacaatggagtgatgttgcaaaccttacgccgcaggacttagcaccctataaaaccgtagtcattgataccgtgggtgcaatgcttgaatgcattaaaacccacctgttacttacggcaaataaccgtcaaaaagatggttctttaaagttaaaggctcaaggattagcgaaccaaacgttcaagcaatacatcaatactttgatcagtttaggtaaagacgttgttttcattgcacacgcttcagaagatcaaaacggtgatcaaattatttaccgaccagatctaggtggtaaaaaccgtaacgagctttaccgtatcgcagatgtgatgggttatctaacaactgttactacaggtgaaggtaaaaatgcccgcgttattaattttaaaccctcgcctacacatcatgcgaaaaactcaggtgctttaggtggtgaaactggtgaagtatgggtaccagatcttaaagcacatcctactttcttggctgacctgattactcaagctaaagatcacattaacaccttaacgcctgcacaacttgcagcagctaaagcccaagaagagctagaaaactggaaacaaagctgtgaagaagctgagcatgcaggtgaccttaatcaattaactgagtcgcttgataaagaacacatgtattaccagaacatgcgccaagcaatgttaatgagagctaaagcattgaattgcacgtttgataaacaacgtggcacttggattagtccaccagaatttaacggtatctcagatcaacaaagagatgaacttcaaaactttattgctgaacgtggcctcgatgtaaaaacagtttgtgagcacttcggcatagatgccctgatccaaattgaagcggcaaaactaactgcagttaaacaagaaattgaaaccttagcgaaaacggggatgacagcatgaaaattctaaataaagttgaagccaaacttgcttgggccaacggtgaattacttttagtaaataatactgagcgtaatggctgggaaccatttaacccttatgactttggctttgatgtttttgataaattcgaatttcaattaaagcctagaactatttttattggtgaatttgaggtaccagaaccattaagagttgcgccagaaaaaggttctacttgctcttaccctagcccaactgttgaattaggtgtgcagcagtttaagtggaatggatctaaaggacaattgcgcatgctccagcatggccaagttcactcaagttttgataatgcatttgctcattgctgcgcgattattaaaatcagcggtggtgagtttgcggaagacattctaaaacttctaaataagcctactgaagaagtcgaagaagaaaagccttcagaaagtcatgcggaatctctaaaagttaaaaattcaaaaccagaggttgtagaaaaagcacaaacagctgagccggctattgaatcagaaaccgctgattcagaatatcagaagaaacttgataccctgctgcaacgagttaaggactcaaaaacaccagacgaagtaaatgcagtttatcgatatacacgcacttggtctgataaacaaatggagcctttgctacttgcaactcacaaacgtcttgaagagctcgaaaaatctaaggcgcaagcaactgaaccaccttcactaatggtccagatccaaaacgcgcccgacctcacaacattagatgctttggaaatagatgtggccgcacgagatccacagattcaatcacgactcatggactttgttaagaaacgccgctttgaattagagaaccctacatctacgccacttcaagaggctgagcctgattatttattaggagacggtttctaatatgaaagatcagtacaagaaagtgagccaaaaacacatgcttggttttatgtactacttgcaattgctgggctacgtaatagtccggcaaggcatggatcaagcgatgtttctaaccaagcattatgcggtaccagtcgcttggcgccgcataacgatcgactatcacaaccggttaaataaacccgcgcagcagctttataaagagtttgttgaatggactaaagaagaatatgcagagatggtggcttaaatgacaggtaatgaacgtatcccttttgaatcacaattcaaaactacagaaatttttaaacgtgaaagtgctattcgtaaaaatgacatcctagcattcagtgaaacaatgaatggctatttcaatattgtaactaatgatgcttggcagttatggaataaagccaaagccgagacggtgccagatactcccacccctagtgtcactctaacttgcgctgaactaaaagaagcctttgattttggtgcgccagatggggaaaaagatcaattccagatggaaactgaaatgaccatcaaatggctccaagatggttatgacggtgaaggatactactgttggtatgctgatttacctgaggaaggttgcattaagttgggtgttagcgaatcgggagctgaaggatgagtgaatcaactttatgggcggttgcaatgcgacctgaaggttacagcccttttaagcaaacgccagcagcttcaaaagagatagctgagcgagctgttgagcgttatagaaaaatgcatgaaaaggaaggcaacaactttttcttagaaatttttgatgatgttatcaaagttcagaaatggcacggttcccgcaaagatcatattaaaaatctattttatgttgagagttggtttagtgaacctatgtaccaatgctttgatttgaagacagctgaacgtgtttttaaatttgatgaaatagtaatttgctacaagaaaggctctgcccctcttgtaaccaaaagctttgatgaagcaaaactattttatggatctagtgagacgggttttaaatatcagatccagccaatagaaccacctgaaaaccttttcaattggtttcatccagatattgaattgtttgacaccattgaagaaggagctgaagcctatacaagagaacagtgggcacaacttcaaatgaatcttagagttgaaattgaaactcaactattagattacgatgaaataccaaatataccggaagatgcagtagtttggccaaactggaagccagaaccgccagaacaaggactctttttaattgcagcatttgattcagaagatggccctgtactttggtgggcaaatcctaaagcggaaagtaaggagaaataaatgtcacgtttaactaaattagatcgtatgactcatgcagaaaaagaggctgctaagaaggaattttgggaagctgctgataatcaaacttttccacctgaaacagtagctattgttatgcacgtatccttaccgtggttgcagaagaaaagatgtgaaggtggcggcattccattctctaaacctcataaacgacaagtaaattatatgaagtctgatgttttggcttatattgaacaaaacaaaatggcacatacagcataagcggctaagtgccgcttttttaatcaccaaaaatagacctttaatagacttaaacttgaaaaatagaccgtatttatcaaaatagaccattaatagactatttttgtattgctaaagattgtgtaatattgcattgtattgctttaatataaattattaaaaatattgattttttaatatcgctaggtattgcttaatattgcaatgtattgctagaattgagaaagacccgctgaactttagggttcaagggtaacgacatgcagcggcatcttcggagcatttatttttaaataaatacctataaattcgaattttattttcaaattaaaatacctagacagacctgtcagtatattttttattctcttaactaattagttgttcttaaaaattaaatactcattatttttttaattattattcatttctacgtaaacattcctcataccatcctgcttggaaatcttcaattgcttggcgtttaaagaaacttgtcttaaatactttggcagcataagctgagctaattaagtcttgataaagctgcttggctttttcatctgctagcccatcggcaatttgttgtaaatcttgtgctggtactttttgctgtcgtgcttccatcacgttataagcgaccttttttacgatattacaaatatccggatcagctgtactttcattagcatagcaaccggtggcaataaaacttaataataatattttaaatttcatatccctatcctattattcatcttccgttcttaaaaaagtaatagatgagaagacctattcctttcaaaatgttcatccaggattaattacataaaaataaatgatcatgaccacaagcaagatggaagcaagtgttaaataggtgccgactgtattaaaactctgtaaaaattttaagatctgcatttcaaatccagagaaaagttgaagtaattaacagaagaaatttagcacaactaaataatgccaatcaattcacacttttaaatttttaacgtgatttaattcaaatattattcattacattttatccccaaagtccctttatagtagtcagttgcacttttcaaatctgacaataatttttcttcagtatacggttttggtgaaacttttattaatgcaggcatgtattgttttttatacacatcaggatagtcatgacataaaattttaactttaacttcttgaggggtatttggattatctaactgatctaaaaattcaccaatttttcggtccgactcttcaaattgagctttataatcaatttgaggtgcctcagattctgcctgtttcgtacatgcgctgagcaatgccacacataacatcattgttaaaatttttaacttcatagatttcacattttcatattcatctttaaatatacttatcctgattaaatgtaaataaatactgtaaatacgtaaaaaagaaaaaattatatgtagacagtttctcctaacaacaaaactatttttacttggtctaatacattagaagactaatttttaataatttttaaatttcggtgaagccatagaaaaacaggtataattttactcgactgacctcaaatctttgttagatttctccatgaatgaattaagttttattagaaaaaatttaagatctagaagacgagctttaacccaatttgagcaaaaacaggctcagcttaatgttttacattgcctaaatcaccttcctatttttcattcatcaaaaaaaatcggtttatatctgcatgctttcggtgaaatccataccgatcttcttatcaaattatgttttaaaaagaacaaacaagtttatttacccatgatttgttcgatgaagcaacgtttagtatgggtaaaaataaataaaaaccaatatttaagtcgtcgtttttctcatcacccattgggaatgaaagaacctatggcgactcgcggaaaacatgtagcacagcttgatttgctacttatgccacttttagcttgcgatcactatgggacacgtattggtatgggtggtggttattatgatcgtacattagctagtgctaaacataagccctaccgtttaggattggcacatcaatttcaatttattgaacacactttagaacgtcaaagttgggatcaaccattagatggtttactgactccacagcacttttattattttaaaagatgatttttatataaaatttataaaatctccaatatatccttttacttttttagctccttaaaaaacgaaaaagtaaccaccctaaggatggttactttgccgtgacagaccgttttaccaacttatattaacacgtctatttggcgctaaacattgaataagttgtgaactattgttatcactacactgcttgtataagtcggtctggctattcgcctgtatttgtatacggcttggttcaacaccttgtcgtaccagtaacttggcaaccgtattcgctcgtttagatgataactcttggttataactaaacttacccaatgggtctgtgaatccagaaacaataattggggttgttgttggacttttcttaatttgctcagcaattttcacaacgctattagtaccttcttcaatcgcactcgcatcaaatcgttcaaaagcaaataggacactcgctgtacgatctgcaattacagtgctacgttctggtgcctgattatttgctcccaaaacaactaaaccttcacacgcttcacccttccaagataaacgttctgctaaatagtgcttatcaaaatcaatacgcaactggcaacgctggtattggtgtgtgttgggaacacggatatctagcacatagttccaaacttttactgcaaaaagcccttcactaaattgtggattgcctagtaaagctcgaatttgatctttatttagtcctgtatctaaacgagcaacatcttggtattcataacgttttacttgtttcaaataactcttttcaatcgctggaaaatgaattttctgttgctgagcctgttcatttgcataagttgtgactgcgaaaccagcaaaagctgctacgactaagctttggattgttttgttcatctctataatctctttaatctgtcgagcaaggagagcattgccctcctaaccagtttcttaattaatcacaccactaataccaacgcggacgcttggctcaccttgagaagcagctgccacaccacctgtaattgaccaacggccattgtcagaggttttgcgtaaggtcacaccgactgcgttctcaccaccatgatatgcagcaccaacagcataggtatatttacctgctacaaacggcgcattttctaaggccatggcagcggcaatacctgcattagcttttttctcaacgtcatcaatacgtttattagtgtcatagaacacttgttgtaactgatcacccagattggtaattttgttacccaattcttggttcgactggtttaaggtcccaatcgcatcattaatattgttcttacctgtaccaccaatattgttggttgtaattgagccatctttaggatcaatcgtagtatttccaccaatactgtttttgatgctttctgaaattttatggatttgtccaccatttacagcttggttcgaaccagctttaatctcaccatctttaacaccttgaacaacacgatcaccctctttaccagccatattaatgctagtaccgccagaatctttaccgaccgtgatttcaccatttggtttttgctgttgaactaacccagctttaccattagaaatgttatcgatgttattctgaatattcttaatatcattcgagttcttatcgacttgattttgaacattccataattgaccaccattcacggcatctttagagccctcagcaattttaccgtcagctacatttttcagattggtacctttttctccaccacctaaagtgactgagttcttgtcgacattgccatttttatctttgtcatactgcacagcatgatcagaaagcttgccaatatctttaccaatttgatctttaacttcgttaatttgcttgtctaattggcctttgttcaccgcatcttttgcattaataccgtctgcaacattggtaatttgtttaccacctgcattaataccattcactgtgatgcttggcccacccttaatggttagaccttgttgatttaagacatggcccccgacattcacgctatcgaacttcacatcttttaacatctcaattttgacaccatcttctgtggtacgggtaatgatgttctcgccactagttttatcttcagcagtttctggattagccccacccacaatattgatagtgtcaccaagcttacggtgaactgctttgccttgggttgttttctggtcattcgcaccaaaatttagccctttttgagtcaagtcatttacaccattagtgactttttcatctacagacttaattgcgtcattgatgttatttttacctgttccaccaatattattggtcgtcagactaccatccggattaacaactgtatttccaccaatactgtttttgatgctattagagatatggtgaacctgaccgccatttacagcatctttagaattttgtgcaataacgccattagccacatcagtaattttcttaccgccggcattaatgccatctttagtaatgcttggaccatctttaatggttaagccattattattaagtacgctatcacccgtggttacactatttaatgtcagatcttttttagtcgacacttcatagtttgtactaccatctttattaacagtttcttttacaacaatgttgtcgccttcagttacagtagtctttgctttcttagctgtattttttacttcgctaatcgcatcattgatgttgtttttacccgttccaccaatattgctagtagtcagactaccatccggattaacaacggtatttccaccaatactgtttttaatactgtttgaaatattgtgaatttggctaccatttactgcttcttttgaagtcgatgaaatgtggcctgctttcacattatctaaaaccgtaccatccttgccttttaaggtaactttatctttggtcttggcatcatcgtatttcaccgcagcatcatcggttgcattttgcttggcagcaagattgtccaactgactcttattcactgcatctttagcattgataccatcagccacattggtaattttcttaccgccggcattaatgccatctttagtaatgcttgggccttctttaatcgtcaaaccattcgtatttaatgtggtgttgccagtggtaacactgtcaaacttcgagtcttttaacagttcaatctgaataccatctttggtagtacgggtaataacgttctcaccgctggtcttagccaccggagttgacgcagctgcaccacctacaatattaagcttctcaccaagtttacgatgtacatctgcaccgctattaccagcaaagttcaagcctttgttttcaagctcagtcttggtgctatcaattttggtattcagctcagttttggtgttaccaatcgtgttgtttaactcagttttagtatcgttaatctgagttgttaactgatccttggtattatttaacttagtgttggtatcagcaatctggtcaccaaggtctttcttggcatcattcagattcttgttggtatcagcgatttgattacctaaatcttttttcgcatcatttaactgattattggtatcagtgattctgccattcaagttatctttgactttggtgagctgatcaacatttactgcatctttggcattgataccatcagctacattggtaattttcttaccacctgcattgatgccttctttggtaatgcttggaccttctttaatagtcaaaccattattattaagtacgctgtcacctgtggttacactatttaatgtcagatcttttttagtcgacacttcgtagttagtgctgccatctttattaacagtttcttttacaacaatgttgtcgccttcagttacagtagtctttgctttcttagctgtattttttacttcgctaatcgcatcattgatgttgtttttacccgttccaccaatgttattggtcgtcagactaccatccggattaacaacggtatttccaccaatactgtttttaatactgtttgaaatattgtgaatttggctaccatttactgcttcttttgaagtcgatgagatgtggcctgctttcacattatctaaaaccgtaccatccttgccttttaaggtaactttatctttggtcttggcatcatcgtatttcaccgcagcatcatcggttgcattttgcttggcagcaagattgtccaactgactcttattcactgcatctttggcattgataccatcagccacattggtaattttcttaccgccggcattaatgccatctttagtaatgcttgggccttctttaatcgtcaaaccattcgtatttaatgtggtgttgccagtggtaacactgtcaaacttcgagtcttttaacagttcaatctgaatgccatctttggtagtacgggtaataacgttctcaccgctggtcttagccgtcggagttgaagcagctgcaccacctacaatattaagcttgtcaccaagtttacggtggacatcactcccgctattgccagcaaagttcaagcctttgttttcaagctcagtcttggtgttaccaatcgtgttgtttaactcagttttagtgtcgttaatctgagttgtgagctgatccttggtattatttaacttggtgttggtatcagtaatctggtcaccaaggtctttcttggcatcattcaaattcttgttggtatccgcgatctggtttcctaaatcttttttcgcatcatttaactgattattggtatcagtgattctgccatttaagttctctttgactttagtgagctgatcaacatttactgcatctttggcattgataccatcagctacattggtaatctgtttgctaccagcattaatgccctgtttggtaatgcttgggccttctttaatagtcaaaccattcgtatttaaggtggtgttgccagtagtcacactgtcaaacttcgagtcttttaacagttcaatctgaataccatcttgagttgtgcgagtaataatattttcaccgctggttttagccgccggagttgacgcagctgcaccacctacaatattaagcttgtcaccaagtttacgatgtacatctgcaccgctgttaccagcaaagttcaagcctttgttttcaagctctgtcttggtgttgtcaattttggtatttagttcagttttcgtattaccaatcgtgttgtttaactcagttttagtgtcgttaatctgagttgttaactgatctttagtggtatttaacttggtgttggtatcagtaatctggataccaaggtctttcttggcatcattcagattcttgtttgtatctgtgatctgattacctagattcgtttttgtatcatctaacttctgattcaggttagtaatattctgggtattcttaccaatattgctcgtattttgattaacacgactatcaacatttttaagctggcgtactgttactgcatctgagtcagctgagccatcttctacattggtaatacggcgttcttttccagccgacccaacagaaatcacaccattagattgagaagcatcacgattagtcaggaaagaagttcctgttgcttctgtcgctacagcatcttggcctaaagcaacactatttttggcttctactttactgcgtgcgcctaaagcaacaccaccttcaactaatgactgagcaccttggccaactgcaactgcattttcttgatcggcaattgcaccgccaccaatcgctgcagcatttttacccgtggctttagcaccaccacctacagcagcagcattttcatttgtagcctcagctcctttaccaattgctgctgaattatcacctgttgcctgcgcaccactaccaattgctgcagaactgttcccagtcgcttttgctccttcacccggtttattaccagagccaattgctgttgaatttgtacccgatgccaatgagttaatacccattgccgatgcgccatcacctgttgcttgtgcaacagcaccgaatgcagcggcacctttacccgaagcatttgacatgacgccaaaagcagaagaagcatcaccagttgctttagaggtcataccaaaagcagaagaaaacgctcctgtacctacagcttgaaccccaacagcagttgaaccatgattcgcttcggttgttggatatttacctgcctgtaaagtaccaccagtaatttccgtataggtattacttaattccgtatcacgtgcgattttatcgacatcatcaccaccaattgcaacagaagagttcccttttgcaatcacgtcggcaccaattgctactgactgatccccaattgctttcgtctgatcaccaatcgcaacagattggttactattgaccccttcggcaccttgagtcgatgcattacgacctatagcaacatccccacgtcctacagtttggctactacttcccattgcaatagcaccagaacctattgcctgtgcactacccccaatcgccattgcctcacgaccagcagcagaagcatttacccctacagcaatagcattacgaccagtcgcaccatcattttcaaagttaccaccttgctgaccattgtcattaatactgacataatgggtacgagcagcttttaactgacgcacagttgcagcatcagaatctgctgcaccatctgctacgttttgaatacggcgttccgttccaatatctccgattgacaaaacacctgttggtgctgattgtttagtcaagtaactttcaccagttgcttgactggcttttgaatctttacctaaagcaatactgttttccgcttcagaacgggcacctttaccaattgctacgccgccttcaaagctagcttctgcttggtccccaataacaactgcattatctttttgtgcctttgcaccggtaccaattgcgacagactttttacctttagactctgaaaatgcaccaattgctaaagcattttcttcagtagcaaccgcacctccaccaaatgcaatcgagtctttacccgttgctttagtagccatttttggttgataagcagcgcctacctgcccagcaacagggtcagcattttcaatatctggtgagccaatcgcaattgaacggtaaccttctgcagtggctgaatgccctatggctaaagaacctttacccgtcgcagcagcaacattaccaatagcttgtgagaagtcggctgtcgctgcagattgacgaccaactgcaagagcagtatttccagaagataaagcacccgtaccaattgccacacctgaaataccttgagtcgtcgcataagaaccaattgctgttcctaggcctttctcaactacagcccccgtaccaacactgattgctccgccttgtttcattgcgccagcataagcaccggtagaattattatatggattattacgatttgcgatgttagagccagttcggtcttgagtttgtgccccgcagccaatagcaatatctttttgattagccgtattagcgcttccttcacgacatgaagttgtaccagaaatagatgttccttggcctattcccccttcggtatttgtcccagcaaaagcatttggagcaaaacaaattacacccgataaaactgccgctgatacatttaaagtttttgatttagtctttgttttactttttgcaatttcagaggttgcaacccatgctccaatcgaagcattccaaatgaccttgtaaactttattcataaaacttctcagacaaataccgaactcaacgaccaataaaaatgtacaaatacatttttaaaatttttggccccaaaaaaagaggcggcatcctaattgaataaatttaaagggtaaatataaaaccgaaataatgataagaaaatttgtgatttcaatcacaaaatatatttttataattaattttaagtttttgaatttattaataaaaatttaaattataaatattatgtgttgtttttgttaataataagtaattttattttaaaatagaataatagctctaaataaatgtttattttttatcaaattaattaaatataaatatttttaaaaatcaattttactttaaaaaaatagaatattagctctaaaaaataatatctaattttatttaaaatatattataaaaatacaggtgtatattataaattatagtgtgattattctaatataagacaaatgatataaataattaatatttaaatatacttaataaaaatatgtattttaaaattaaaactaaacaaataattttacttacaaacaagtcttgctccagtaagagaagaagaattattaagtaaaaatgagtagccgctctacaaaattttattcttcttaagaattaatctattgattcataacatttttaaaaaaaagttgactaaattagtccttttttcaacattttctattgtcatgcccttgtaatttttaaaatacacatcactataaaaaacatggcaacctcgttgtcactcattaggagtgcccatgtctgaacttattatgaatgaaaaaactgacttagagcctcaggttccaagtgtattaccactattagccttacgtgatgtggtggtttatccacacatgcagattgcgctatttgtgggtcgtgaaaaatcgatcaatgcagttgatgtggctcgtaacagtgacaatttagtatttgtagttgcgcaaaaagattcgcttacagaagaaattgatcacgacaatttataccagtacggtacagtcgctaagattgtacaagtagttaatcatgaaaatgatgaaaactgcattaaagtacttattgaaggcttacatcgttctaagttgaaaaaaattatcgatgaagatagttatttgactgccgaacatgaattaagtccaatgacgattaatgtagataaggcaacgcaagaaactcgtttacaagagttacgtaatttatttgctcaatatgcagaagcaaaattacgtaatgcacgtgaactggttgctgctgccaacaaaatcgaagacttattgcaattgatgttcttcgtagcaactcgtgtgcctctaaatattgaaattaagcagaaatttttagagtacgatgagtttgaagctcatttgcaagagttgatgaactacttgatgaatcaatctgctgaacagcaaattgagcaaactttacatgacagcgtaaaacgccaaatggaaaagaaccaacgtgaatactttctaaatgaaaaaatgaaagtcattcaacgtgaactttccgatatgaatggcggtgctgaagatgacgttgctgaaatagagaaacgtcttgctgaagctgatttacctgaacacgtacgtaaaaaagccgaagctgagttccgtaaacttaaagcaatgcagcctgcatctagtgaagctgctgtggtacgtaactatctagaagtgattctagatacgccatggaacaaagcgagcaaagtcagtattaacctgaacaaagcgcaagagattcttgatgccgatcattatggtcttgatgacgttaaagatcgtattgttgaatacctagctgttcaatcacgtgtgaaaaaactcaaaggccctatcctttgcttggttggacctccaggggttggtaaaacttcacttggtgaatcagtagcgaaagcaacaggtcgtgaatttgttcgcatggcgcttggtggcgtacgtgatgaagcagaaattcgtggacaccgtcgtacttatattggtgcgatgccaggtaaaatcgtgcagtctttaacaaaagttggtgtgaagaacccattgttcttactcgacgaaattgacaagatggcacaagactaccgtggtgatcctgcttctgctttgcttgaagtgcttgatccatcacaaaacagtaagttcaacgatcactatttagatcttgatcttgacctttctgaagtgatgttcatctgtactgcaaacagcatgaatattccagaagccttgttggaccgtatggaggttattcgtctaccgggttataccgaagatgaaaaagttaacattgctgagcgttaccttgttcctaaagcaattaagaacaatggtctacgtccaaaagagttaactattcatgaagaagcgatccgtgacattgttcaacgctatacacgtgaagctggcgtacgtaatttagaacgtgaagtttctaaaattgcacgtaaagtcgtaaaagaagcggtaagtaaaaaatctaaaaacttacagcttgacgttacctctgccaatcttcctgaatacctaggtccacataaatttgactttggtatggccgaagatgaagcacaagtaggccgtgtaaatggcttggcatggacttctgtagggggtgaattgcttactattgaagttgccgcagttaaaggtaaaggtaaattcattacaaccggttcactcggtgatgtaatgaaagaatcaattaccaccgcaatgactgtagtacgcacacgcgccgatgaacttggaattgaagcatctcgctttgaagaaactgatgtacacgttcacttacctgaaggtgcaactccaaaagatggtccatctgctggtttggcattaacaactgcacttgtatcagcatttactggaattgcgattcgaccagatattgcaatgacaggtgaaacaagtctaggtggtcgtgcgatgcgtatcggtggcttgaaagagaaacttcttgctgcacatcgtggtggaatcaagctcgtctttattcctcaagataacgttcgtgatttggcagaaattccagacaatgtgaaagaaggattagaaatcaaagctgtgaaaagcattgatgaaatcttacctttagcattaacttcgatgccaaagcctttacctaaaacaccgattgtaaaaccggtggaaggctcaaaagcagcgcgtcactaattcacatataaaaaaagagggcttcggctctcttttttttgttacacaatttgattgaaaaatatccaaccatcctcataataagaagtaagagtaattaattctattatttgctcttgtctatcttatgtcacagatagccttgtttttattctctatgatcatctgaactccagacagatgatcatttgatcgcagtccaacaccgttttttggactgcgttttttatgcccacttactcccccgcagttaacctctcctcaggtataatgtgccagctgttttgactgaatagacaacatgaaaattcgtattctgaccattggtcaaaaaatgcctgcttgggtacttactggttttgaagattatttcaaacgcatccagccttttgttcaaactcaggttattgaactcccaatggcaaaacgcggtaaaaatgattcagaagcagatattttaaaatactgtcaaatcgagggtgaaagtattttaaatgctttaaaacctaatgagaccctcattgctttagaagttggcggacgcgagctcagcacagaaaaactagcagacaccatgaaacaatggatgcttgaaggtaatgatgtggcactcgctattggtggcccagatggcttgtcagatcaagtacgcaaagccgctgcttggcactggtcactttcaaaacttaccatgccgcaccctttagtacgtattttattaatcgagcaactttaccgagcaatgagcattaatcataatcatccttaccaccgtgcataaaaagaacaaacgtttcattttaagaacaatacgttgaaatcaggatacttttaacatgtcctgattttggcataatgactattattctgcttttcaactcaggtgtaatgaaatggaactacaaacccttcccggactgtttatttcacatggttcacccatgcttgcacttgatccagaacaagtgggtcctgccttacatcgtcttagtgtaaatctgcctactccaaaggcaatcatagtgatgtctgctcactgggaaagtaaagcactcgaagtaagtagttcgactcgtccggaaacttggcatgatttccgtggtttcccgccagagttatatgaaattcgctatagtgcccccggtcaacccgaacttgcagaagaaattttgaagttgttagcagatgctcattttgtcgcacatgccaatagcactcgccctcgtgaccacggcgtatggatgcctcttttacatatgtatccagaagcagacattcctgtcgttgaaatttctttacctatgggcttaactgcacaggaaatttatcgaattggccaaacgctagcacctttacgtgaaaaacaaattttactgattggttctggaagtattactcataatcttgctgaactgtcttggcaaggtgacaattcgaaagtacctgaatgggcttcaacttttagaaatacagtggtgagtaagctgagtcatcaagattatgatggtgtactggagtggcaaaccctgccgtttgtgaaacgtaatcatccttcacttgagcattttgcacctttgtttttcgctatgggtacgggacatcgttttacgattgttcatagtagcttcacaatgggctcactaggtatggacatataccgctttgattaatttttggaaaataccccgttttgcggggtataccactatttttgttgaaaattagaataatttacaaacttatacattttaaaaaccgaaacaatcaaatgtttacattttctttttttaagaatgttttaagcttagtgctgttgtttttttacttgaagttttttaaatgaaaattaaatatttaattcttgcgttattacctttttctttgatggcgtgtcaaacagtttcaaacactcaagctccaattgtatctgagcaacaacaaaatcttgctactactttaagtgaatatacttggacttatcaaaatgtaaaagcatctaagccacttattcttaactttaatgcagacggtaaattagcaattaacactggctgtaatggccaaggcggtacttggaaagttgaaggcaaccaacttataacttctccacttgcatcaacaatgatggcttgccaagacgatttaatgaaacaagaacaattgtctaatagcatctttagtgaagcgaaattgccaatcgaaattagtaataacaatggtctggtaatcttaagcgtgacagataaagcaggtcaaaagcatattttccaaggcgaaaaagcaactaatactcaagctttaactgattattcatggtcataccaacctgaaaatactaaaaagccgattgttcttaactttacaaacgaccgtttatcgattgatacaggttgtaaccgccaaggcaccacttggaaagttgaaaacaatacgattgtaacgactgatgtcatgtcaactatgatggcttgtgaacctgctttaatgaaacaggaacaattctctagcagcctcttccaaaaacgtgcaattccatttgaactcaatacaacaaatgttgatcaaccaacattgacagtaactgacgctcaaggccagaaatatacatttacgggtaaaatgacacctgaagcaaaatatcaatctgaaggtaaaactgttttccttgaagtagcgccagaaactaaatcttgcacaggtgttgcaccacaaacttgcttgcaagttcgtgaagttaaatatgatgacaaaggcgtaaaaacttatgctgacaaaaattggtcattatattacggtcaaatcgaaggttttgaacacaatccaaaccaacgcgtaatcttacgtgtaaaacgttttgaagtgaaaaacccggcagcagatcaatctagccaagcagatgtattagatatggttgtagaacaagaactcgttaaaaagcctaaaaaataagttttagactaaaaaatccgatgcttttgcatcggatttttttatttctatattttaatagataccttgtgcaagcatcgcatcagcaacttttacaaaaccagcaatattggcaccatctacataattcacagtaccatcttctttagtaccgtatctaacacaattggcatgaatatctttcataattgcatgtaagcgttcatcgacttcagcatgtgtccagcctaaacgaatcgcattctgagacatttctaaaccagacgttgccaccccacctgcattagaagctttaccaggcgcatacaaaatcttagcttcaataaaatgctcaacagcttcaagtgtagatggcatattagcgccttcagccacacaaattaccccattagcgatgagcgttttggcatcttcgccagttaattcattttgtgttgcacatggtaaggcaatatctacaggaatatgccaaggtgtcttcccttcaaaatattcaaagccatgcttagaagcaaattctgaaatacggccacgctggatatttttgagttccataacttcagcaagcaactcatctgtaaaaccattttttaaataaacggtaccatttgagtccgatagcgtaaccacttttgcacctaagaacattgctttttcagcagcatactgcgcaacgttaccagaaccagatatcgaaacagttttaccagcaaaagactgcccacgtgtttttagcatttcttctgcaaaataaaccgtaccgtagcctgttgcttcagggcgcattaagctaccgccaaatgaaattcctttacctgtaaacacacatgccgtgtcattactgagctttttcatcatgccagccatataacctacttcacgtgcacccacaccaatatctccagcagggatatcagtatttggacctaaatgacggtaaagctcaatcataagtgcctgacagaatcgcataatttcagcatcagatttacccttagggttaaaatctgaaccaccttttcctccacccattggcaaagttgtaagtgagtttttaaaagtttgctcaaaccctaaaaattttaaaatagataggttgaccgacggatggaaacgcataccacccttgaatggaccaattgctgaattgtattgaacacggaaagcacggttaacttgagtctgcccttgatcatccatccacgaaacgcgaaattggatcacacgttctggttccaccaaacgttctagcaatccctgctcggcatattctggatttttttcaataaatggccacaagcttgtcatgacctcttcgacagcttgtaaaaactcaggttgatgcggatcacgcgcttgcacgtaattcaggaattcattcaggttgttatatttcaatgcacggtcctcagcatagtaatgaattaaattggtgcaatacattttaaaatgcatcatttagcagcaaaatattaaatccctttccatcaattttaacaatagttattttaaattattttattcttcttaattatcataaacttatttttagaaaaactgtctaacaatcaataatagtcatttatcttttcacttttattgatctattattgtgcaatattggcgacattttaggtcaatcaaaaagccaataaattcgttaaaatccattgaccttacttaggtttttcttcattatcgcatcgttttaagcaagctattttcctctatgaatccatctatttctctcatacgcgagattgatgcgttattaccacaaacacaatgtggtctgtgtgggcaccgtgacggctgtctaccttacgcaaagtccattgctgaaggtgaagaagcaaataaatgtgttcctggtggacagccagtggcagatgcactggcacaattattaaatcgctcattattacctgctgaaacgagtgtctggcctgtacaggcggatggacgcccacaacgcatgaaggcaattattcgcgaagatgaatgcatcggatgtacaaaatgtattaatgcctgcccagtagatgccattattggtagtggtaagctcatgcatacaattttgactgatctatgcacaggttgtgagttatgtattccaccctgccctgttgactgtattgatctggtcgaagacactcaagcattgccaagcgaacagcaacgcattgcagaacaaaatgatttacgtcaacgttattacgctcatattcaacgtgaagaaaaacgccgtattcaccgcaaaggccctgttgtacgtgctgaaatagatactcagctgtttgcacagttctctcaagcacttgatgatttaccttcaattcagctcatcgagaagccaaaagaagcgattgtaagcgatgcaaaaaccacaattgaattagcgaaaattcgtactcaaattaaaaagttggaaaagcagctcagtgttcgagaagatgccaaaaagcgtcttcaacttgatgaactacaacagcaactcattcaattacaggaggtgtgaatggccgtcaaaaatatgacgaaaaagcagattcaaattttctttgaacgccttcgtgaacaaagaccttctccacagaccgaattaaagtattcatcaccatttgaattgctcattgccgttatgttatcggcgcaagcaaccgacgttagtgtcaacaaagcaactgataagctctatcctgttgcgaacaccgctgaaaaaatctataacttaggcgtagacgggttaaaagagtacattaaaacgattggtctttataacgcaaaagccgaaaatgttatcaagacctgtaagattttaatggagcagtttaacggtgaagttccaagtaaccgaaaagatttggaagctttgccaggcgtaggccgtaaaacagctaatgtggttttaaatactgcattcggtcaaccgactatggctgtcgatacccatattttccgtgttggaaaccgaacgggcttagcaataggtaaaaatgttcttgaagttgaacaccgcttagtaaaagtcattcctaaagaatttattttagatgcacatcattggctgatattacatggtcgttactgctgtattgcccgtagaccaaaatgttcagagtgcgtggttgctgatgtatgtaactggccggaccgctttgaatttggtgctcaaaaacaaattgcggttaaaaatattgaggcagaataaaagttgggtatagcttatacccaatttggttactttaaacgcttttgctgttttctttcttctttcgcttgtttttgtacttttctcagcattttgtagctttgatacagtaaaaataacaatagtgccagactcagcaataccaccaaaatcaaaatgattttcaaatcattctcctgcacttaatgaaagaaaagagccctcacaaagagggctcggtattacaaataatattaaattatttgtctaagatgttgaacaaatctttttgtacatcttcaattgtacgcaagccatcaagcttgtcataagttggcgcattttcaccagaagcagcacgaccttggtagaaaccaaccaattgttctgtttcagtgtgataagacgctaaacgcttacggattgtttcttcttggtcatctggacgttgaacaagatcttcaccagtttcatcatctttaccttccactttaggtggattgtatacaacgtgataaacacgaccagaagcaggatgctgacgacgaccagaaagacgttttacgatttcttcatcaggtacatcaatttcaattacatgatcaatgctgatcccttctttttccaaagcttctgcttgaggaatagtgcgtgggaagccgtcgaaaatacaaccattcacgcagtcaggttgagcaatacgttcttttactaaaccgataatgagttcatctgaaactaaaccgccagattccatcacacttttagcttttaaacctaattcagtaccttcacgaattgcagcacggagcatatcaccggttgaaatttgtgggatattgtagcgcttacagatcaactgagcctgagtacctttgcctgccccaggtggtccgagtaagataatgcgcataaaaaacatcctcatttaaaacaatgaatgtgaggtctggcagatttagtttcattgatcttcaatagatcctgcccgacttcgaattataagaaagccacaaacaaatgtattgtaccagcaataaatccggttaccccacctagtacaataagaatccactcgtcctcttgaaatgctggacgtaacaaattctgaaactcttttggtgttagttcacgaatacgctctttaaacatttgaaaaatcttctgtgcccggcttgcatttagtgcagggtcacataccggtcccatcgtaatttcaattgaacgatcaatcaagtccgtctttaaccttgcatactctcttgggcctaaagaaagctgtaaagatgttcgaacaagtggagtttccatgatttcgttaatatgacgtttaacaatacgacgcgttttgtccttgcgtgaaccatacatcatttctgtcataattgattttaacgtaatcagatcttctgtcactacgcttgagaagacttctgaaacttcttcttgacgcttcatgaaagccccttgaacattataagtaccaattcgtaaaacaggtacaatccaagggaacttacgatcttttgttaatctaaatatttgcggataacgaatgtaatgcggctcaatcgggttaaataccatccagattgcaatccagttagttaaaaagccccaaatagacgcccaaaacggtactgtccaatgccaaggcaccacaaaccagaccaccatttggaaaacaccaaagaacatcccgattaaagcactaatatgccaaataaagttgatttctttttgtccaacttttaaaaacatacgtaccattaaacggcgatcaccttccatttggctcaccaccatttcacgcatatcaaccagtgactcaacgttcatagtcagctcagtcactaattctctgagtacacctggcaactgcttatgcgcttgagcataaatacggcgtttaatcgaataaggtaaattttcccaaagcactgcattacgatcgatcatgacttcatcaatcaaatgctcaagttcaaatccgacttgctcaccaataatacgcgccatgtcttcagggtccattgcttctaaaaactcacgcaaagaacctaacttggataaagtattatcggtaataattccagagatacgtccagctttacgtggcacaataccttgccagccgactggtaaaggacctaaatgaaatccccaaaacttgattgggtaaaacaccatttttaaagccatccacacatgtgcccatgtgacaaaggcagtgaccggaatgatactcaaaacggcccaaaaatcaggtctgtgtaaaaaggtctgccacaatccgctgacgtactctaacatgtaagactctcgtatttatttgtgctctgcttatggcgagttaacgataaactgctttgttttataaaccaaaacttagagaataagaaaattgtatttgtggtttagtatctgcagcaacatcaccattctggtccgttaatttttccgctgcgccgatacccacactaaacgtactaattctttctgaattcaacaatacatatgccaaatcaacaccagcacctaaacgagatttataatctccatctaccgatttactatcaagatgtccagcataaaagccaatatagtaaccatttttatctgttccagtaaggtagtacggatagcggaatccgacttgtcctccagcagttttatcgccatttaaaaatgcaccaacttttgcgtaagcaattccataaggatttacccactcaccattgagatgtaacaatttttgtgtaaaaccggcgcctacattccaggtagatgctttatgatctgctaattttgcttctggaagaaatgagtaatcttgagcatgtgcccaactgcttactgtcaaaactgcaagtaagggataaatttttctcattattttctccattttccctaatcgtatggtgagaacaaccctattctattgaatgagagactttaacagaattattttgcttcttatatacaagactctacaattttgttgtctacaaagtcaaaaaagccaatttgcctcttcactgaaactttgaaaaatatgcgatattttaagtgcgcttgcgttagaataagcagctatttttctcaccctatgtcattaagtcgatccgtatgaaacagcactttcctttaaaagatatccagcaagaaaagcgcatttatcgaggtcgtatattttttgccgtagggcttgtgattatctgtttattggtactagccagccgatacgcttatctacaaatttttcattatgatgagttctcgacagcatcggataaaaaccgtattcgcctacaaccccttccacctgctcgtggttatatttatgaccgcaatggggttttactggcagataactaccctgtttttactgcaacattaagtaaagcagatgttgagaacgttgataccgttattgaacaattacagcctattttagagctcactcaagaagatgtagatcgttttaaaagccgtattaaaacagcacgtaaaactgaacgtgtggccattaaactgaatttgactgagacaaatattgccaagtttagtgaagttaaatacaaatttcctggggttagaattgaaacccaaatgacgcgctattatccacatggtgatttatttgctcacgtgattggatatgttggccgtattaacgataaagaattaaaaagtattgataaagatttatacgctggaacaaacctgattggtaaaattggtgtagaaaaaagctatgaagatttacttcatggaacacctggttatgagtctgtagaagcagatgctcatagtaatattttgcgtcacctaggccgtaaagacccaacccgtggtaatgatctctacttatcattagattatggtttgcaagttgtcgcatcacaacagctcgcaggtcgacgtggtgcaattgttgcgatagacccacgcaccggtgaaattcttgcgttggtttcaagcccaagctttaatcctaacttatttgtgacgggtattaatcataaagattatagttctctacgtgacaatatagatcagcctctttataaccgtgcagtacaaggtgtataccctcctggttcaaccattaagccaatggaagcgatgggcggtttacattatggaattgttgattgggctactgctatttccgaccctggttatttccatttaccgggtgactcacacaaattccgtgactggaaaaaaaccggccatggcatcgtgaacatgcacaaagccattatcatgtcttgtgacacctatttttatattttggccaatcaaatgggcatcgatcagatgaaccaatggatgcgccaatttggctttggccaaaaaacaggtgtcgatttaccaagtgaaagtgaaggcttatatccaaatcctgaatggaaaatgcgtacacgcaaatccaaatggatgaaaggtgaaacgatttcagtcagtattggtcaaggtgcatttaccgcaactcctttacaactcgccatggcaactgccattacggcgaaccatggctcgcatgtagttccacatgttttacgtgcaacccatggtgcaaaaccttttaccgtacgtaatgcacctgatggaaaaattaatttcaatggtacagatgaagattgggtaaaaatgcgagaagccatgattgatgtaattcaatcaggtactggtcgtggcatccgtacaccgctctatcaaattgccggaaaaacaggtacagcacaggttaaaagtattgctcaaggtaaacgttataacgaagctgcgcttagtgaacgccaacttgaccacggtctttttgttggctttgctccggctgataaaccagaaatcgctattgcagttatttgggaaaatggccgtcatggtggttcagcagcccaacttgctaaacccgtgtttgattactggttattaacccgtaagaaaaatccgattcgaccagccaaccatcaggttaatggtggcttgatgaccgctggaattaaaccgggtgaactcccaagtggtaatgaaagtgccagctctactcctgcgacctctgctccgacttccgcagcagcctctactccacaggcaacaccaactcgtcctgctacaaacgaggtcgatgaataatgaaaaatcaattacgcattattgggggcgaatggaaaagacgagttttaccattcgccagtattgaaggattaagaccaactcccgatcgtgtccgcgaaactttatttaactggctcatgtgggacattcaaaaagctcatgttctcgatatctgtacaggttctggggcattaggctttgaagcattatcgcgcggtgctgcatctgtttatatgattgagccagataagacgcaggcacgatttttaaaagataatattcaattgctcaaagcgcagaattgccatttaattaatgcaactgctcaacaagctctaccacgcctaaaagaacagtttgatgtcgtttttttagaccctccttatagtcttaatttatggcaagaacttgcccacttagcagatatccatattaaaaataatgggtacatttatgttgaagctgaccgagatttatctcagcttcaccttcctgcaacatggcagcaagttaaaacaaccaaagctggtacagtccatgcagggctttaccaaaaagtaagcgaataaaaaggtagccttaagctacctttttcgctacaaagttttaaattaactcaaaccaatcactgcaacaagtgctgcacaggcacctacaatttttttgccatatggcacataacgtgtaaatactgcaccgagtgcaagcccaccacaatagataagtgccataccagcaaccataccagttactaacgccacgatatgccctgcatgtgctaactcaacaccatgagccataccatgaaagcttgcgagtaaagcggcagcgataggtaaaatccgatttgattttgtccatagcgcaatcgctgtaataattaaagaagcaacaataccgtattcagcaacattggcgggcaccaaaccttgagcacctaccaaaaagccgatcactaaggtgatacttaaagtgatgacaccagcgattttccactgtttggctgccgaccatagcaagacaccaaagcctaaagccattattaaatgatccaaccctgtaaacggatgaataaagcctgccataaaacctgaatgtacatggtcttgccccggatgagccatagctaacgcaggtaacatgctaaggagcccaacgctccattttttaatgaagttcatagttactccttaagccttaaacagcccttgcttctcaataaattgaataatttcttcaagcccatcttgtgttttcatgtttgaaaataaaaatggcttttcaccacgcatgcgttttgcatcttggtccatcacatcgaggtttgctcccaccattggtgcgaggtcagttttattaataatcagtaaatctgacttggtaatacccggtcctcctttacgagggatcttttcgccacctgctacatcaatgacatataaagttaaatcagaaagctctgggctaaatgttgctgctaaattatcaccaccgctttcaataataatgagttctaagccatcaaatttttcgcacagatcatcaatcgcagctaaattaattgaggcatcttcacgaattgctgtatgcgggcaaccacctgtctcgacacctacaatacgatctggtgacatcgcttcattacgggttaaaaagtttgagtcttctttggtataaatatcatttgtcaccactgccatattatatttatcacgcaaggcacggcataagttaagtgtaagtgctgttttacctgaaccgactggtccgccaattccgactcgtaatggactacgttctgtcataatttttatcctttttcctaaacttaagatctgaataaccgtgaatattgagtttcgtgtttcatgctcagcatggcatagcgcggcaaagcactactcaattgctcatctttaagttttaaagctttctctaccgcttgtggtactcgcccatgcaaatgccataaaattctttgtcctgccatttggcccaatgggacagtttttactgcggctaaaacctgattttctaaaacggtaaaggtatacgccgtaagtacatccacctctttaagttctaaacgaccgcaaagctgtgcatagacaggcacaaaaccaaactgctttttaacctcaactgttttctttaaaacatctttaatccatgcatttaaagaaaatgcgagttgctgagattcggccaaaagctctttactttctcggcttgccttatacaaatgtgcccaaattagaaactgatctgggtcatcataatgttgcataagacgtttaagtacaggcaactcaaagcgtactagcagcatttcaagcacttcttcaaagtaagcaattgccgaggattcatcgtgtattaagccaatatcaatggcggtttccacaccttgcgaatagcaatatgctccaactggtaatgccgtagaagacaatgtcagcagttgcagtaattgcgcagcattatgagtggacatggtgtaaaactttgattggacttaaacgatggtcatggctatgctgtgcataggcaccgctttcaggttcaaatggatgatcggtttctgtcacagtaagtcccaaaccttctaccatttctgcaagcacatgatcaggctcaaaatataaagctgttggtgtcagcattaatggcacatgtcggttacctaaatgataagccgctttaagcaaatcaaattcagtctgagcagtgactttcattagccgttcaggtttggcatcgacacgtaatacatccccttcttgcgttgcaatatatgaaccactacgcaaaatgccggtacgtggcaaatccgcaccaatatctacgccactcgctaaagccgctcgaaaacgtgatttttggcgggtatcaaacgttagctcaaccgtttcaaatgcctgatcaggagaaatatcttcaagacgttgggtgtaaattttcatttagcttttctctccttacttatttctttcatatataaggtaatgaggcaaatcacctctataaatttcattaaaacaagaaataacgctgtgccatcggtaatacgtcagcaggttcacacgttagtaattcaccatcggcccgcacctcgtaagtctcaggatgaacctgcataacaggacaatatgtattgtgtttcatatcggctttggtaattgaacgcgtgtttttacagggactgattaactttttaaggtttagcttctcagcaacttttttatcaattgcgacttgagataaaaaggtaatacaggtgttatgtacaccacgtggataagcaccaaacattgggcgataatgcactggttgaggtgtaggaattgaagcattaatgtcacccattggcgctgctgcaatcatgccacctttaatgatcatggaaggtttcacgccaaaaaacgcaggcttccataacactaaatcagcaagttttccgacttcaaccgaaccaatttcatggcttaaaccatgggtaattgccgggttaattgtatatttggcaatgtagcgtttaacgcgattgttatcatgaaactcattatcaccctctaatgggccacgttgtactttcattttgtgggcagtttgccaagttcgtaaaatcacttcacccacacgtcccattgcctgagagtcagatgacatcatggcaattgcgcctaagtcttgtaaaatatcttcagcagcaatggtttcacgacgaatacgactttctgcaaaagcaatatcttcagcaattgctgggtctaaatggtggcataccatgagcatatctaaatgctcatcaatggtattgatcgtgtaaggtcgtgttgggttggtcgaagatggcaagacattactttgcccaattgcttttaaaatatcgggagcatgcccgccgcccgcaccttcggtatggtacgtatgaatcgtacggtctttaaatgccgctagcgtttcttctaaaaaaccaccttcattcaatgtatccgtatgaattgcgacctgtacatcatactcatctgcaacgctcaaacagttatcaatagccgcaggtgttgaaccccaatcttcgtgtagttttaacccaattactcctgctttaatttgctcgctaatggggtcaggtaaacttaaattccctttacccaatagaccaatattcataggcaaatcatcaatcgcctgcaacatggtcgcaatatgccaaggccctggagtcactgtcgttgccgaagtacctgccgcaggtcctgtccccccccccaccattgtcgttgtcccagacatcagcgcggtttcaacttgctgaggacagatccagtgaatatgagtatcaataccaccagctgttaaaatttgtccttcacctgcaattacttctgtcgcagcacctaaaggaatggtaatgtcgggttgaatatcagggtttccagctttcccaattttccagattcgtccattctttaagcccacatcggctttaacaattccccaccaatccacaattaaagcattggttatgactgtatcggcaacttcatcagctagaagctgagattgtcccatcccgtcacgaataacttttccgccaccaaatttaacttcttcaccatatgtcgttaagtcttgctcaacttcaataaaaagcgctgtatcagccaaacgaatacgatcaccaaccgttggaccaaacatttctgcgtatgcacgacgtgacattttcataacttattactcatcttttcattattgttgttatctttaatccagcttgcccattacccgaccagcaaaaccatatacttctcgcttaccagctaaagcaacaagctctacttctcgactttgtcccggttcaaaacgtattgctgtgcctgctgcaatatttaaccgaaaacctttgactgcctcacgatcaaactgtaaggcatcgtttgcttcatagaaatgaaaatgcgaaccgacttgaataggcctgtcgccaagattagccaccacaacctttaaagtttctcgtccaacatttagttcaatatcagtttctggagtaataacttcaccgggaatcataagtattccttttatacaatgggctgatgaacagtgactaatttcgaaccatcaggaaaagttgcttcaacctgcacctcagcaatcatttccggtacgccatccatgacatcttcacgctttaataaagtcgttccaaagtgcataagttcactcaccgtcataccatcccgtgcaccttcaagtaaggctgcagaaataaatgcaacagcttccggatagttcaactttaagccgcgtgctttacgacgctcagccactaagcctgcagtaaaaatgagtaacttatctttttctgttggattgagttccatatctctttcctaaatagcatctaattttctttaagcaaaatgcgtgctcaaaagcagcataccggttttaatcgtttttaaaatacgcaatttaacgtaacttaagttttccaaattcttggaaattcttcatctaaatcaaaccaataacgtcttaatttagcccgtatagctgcgaaagcatcatgacatcgtcgtacatcatttcctaaaaaacgcgcacacagtacatcttctaataaggtcaacgtcacgggaacatccatacgcataatgagttcacggatgagttcaatatgttgctctaaataaaatgaagaacggaatttttcagggggcacggcccaaaaactggccatcaccgcttgattattcattcctaaacacgagcttaaccaacggtcgcctccctcaaaatataaagtatcggcaactaataacttgtttttgcgccataatttaaactggttgtgatagcttccctgaacaaaattctcagcccgagcctgccgccccaagaccaacatatcccatccaataaagcttgctgtttgttcaagatggatatctgtttctgagtgggctaaagcaccgtcaaaaagcattgtttcttgcggcatccactctaaaatagaatcatcttttacattcaaataaatatgctggaaagcatgttttccatttgttctataccacttacccgctcccggtgtggtaattacagcatgcgcctgcctttctgtttcaatttgaaaagtaagatgatcaccgcctgcaattccagccggtggatgaacaataatggcatgacaaaccccagttttttcgggccagagcattttttgcacccgaacggggccataatgctttctgtgactcattatggtgcgcgagttttcataacaaaaccccagttctaactgggcataccaaaatggtgctgaagaagtctgaaaagtttgttgaattcgattcattttggctcatttttgataatggcttttttgataagcaaaatatgcaccaaaagcaaaaagtggctattacaaacttagaaacaatttttttattttaatgagtcaaaaaatcatcaatgtctaacataaaaccacagtaaagcatggaattatttatacaatagcgcccattctcgctcttataaatttttcccatgaaaatctttttcgtgttagtaccgtttgtatttttaactgggtgtatttttggccaatcaagtgaggtcaaacgtgcagaaaaacttttaaataactttcaatgtaaaaatattgaaacaagtgaaatttctacaagttcaatcaactcttattaccagcaatctttagcggtgagtaaggaaaaagcgacctcttatgtagaaagctataaaaatggtgaagaattatttgcaatgcccttagatgaagtcgtagaacagcaataccaactttataaagcagcgtgcgattctttaggtggggtttctgcccaaccataaatttttaaaagtatccattaaatcactttagtggatacttttaattctcaactaaaatataaaaaaacatagccccaatctgtgcaatttttactcactttaccttttgttaaaattaaactacatactaaagcttttattttcgattcttttttcctagcctgtcagtactttatatttatttttttgaggttttattcattatgaaaaaatcattattagcaattgcacttatgagtacccttcttgtcgcatgtaataaacatgaaaataaaacagaaacaacctctgatgcatctactcctgtacaaactgctcaatcaaataataatgaagcggtagatacagcacatacagccgagaattctttagattgggatggtaaatataaaggtacgcttccttgcgcagactgtgaaggcatcaaaactgaattagaattaaaagatgataaaacttatgagctaacagaaacctatcttggtaaaggtgatgcaaacccatttgaaacccatggtaagtttactttcgataaagacaatacttctgttattaccttagatgataaagctcaaaaccgtaaattctttattggtgaaaataccgcgaccgctttagatatggaaggtaaaaaagttgaaggttctttagctgaacattatgttttgaaaaaagaagattaatctatttttcaatataaataaaaaacccgctcaaatgagcgggttttttatgaagtcaattcttagtgagctgagaattggttcattgtgtttttagcatcgtcaccagctttaagtgcattttcaccagcgaagatttctttgtggtcatcaccgatgtcagaaccagccattgcttggtgtttcacacatgcgataccgccacggatttctttacgttgtacgccagcaacataagctaacataccttggtcaccgaagtaaccttgtgctaattcatgagtagaaagagcagcagtgtggtatgtaggaagtgtgatcaagtgatggaacacaccagcttcacgcgcagcatctgcttggaaagtacggattttttcatcagcttcagcagctaattcagtattgtcgtactcagcgctcattaatttagcacggtcgtaagcagatacatctttaccttctgcaacccaacgatcgtacgcttgttgacggaagtttaaagtccagttgaatgatgggctgttgttataaacaagcttcgcattcggaactacttcttttacacggttaaccatgtgtgcaatttcttgtacgtttggagtcggagtttcgatccaaagtaagtcagcaccgttttgaaggctagtgatacagtcaagtacaacacggtcaatctgagtgccttcacggaattggtatagaccagaagctaaacgagttggacgatgtaatttaccatcacgtttaattaagatctcatcttcttgagcttctgagatatcaatttcttgagtatctaagtagctaatatatttagatgcgatatcacctggctctttaactacagggatcttctgagttaagtcagcgccttcagagtcagtacgagcaacgataacaccgtcttcaacacccatttctaagaatgcataacgaagtgcatggatcttagcgatgaagtcttcatgtggaacagttactttaccagcttggtgaccacattgttttgcatcagatacttggttttcgatttgaagcgcacaagcaccagcttcaatcattttcttagcaagtaagtaagttgcttcttcgttaccgaaaccagcatcgatgtctgcaataattggcacaacatgagtttcgaagttgtcgatttgagctgtgatttcagctactttcgcagagtcaccagcttcttttgctttatttaaagcacggaacaagtcatttaattcttttgcatcagcttgacgtaagaaagtgtagatttcttcgatcaaagcaggtactgaagttttctcgtgcatagattggtcaggaagtggaccaaattctgaacgaagagcagcaaccatccaaccagaaaggtagatataacgtttgcttgtcgtaccgaaatactttttgttagcaatcattttttgttgagcgatgaaaccatgccagcaacctaatgattgagtatatttgcttgaatcagcatcgtattcagccatatcacgacgcataatcgcagctgtatacttagcaatatctaaacctgttttgaaacggttttgaagttgcatacgagcagcatcttctgggctaatgtctgcccaagtgttgccgaattttgcttttaattcacgtactgcatcaatcgctgtttgatatgtagtcatgatattgtcctgtattcattttaggatttcatcgatcgaagcctagagtcatgttatgaaaattccctatgacaccagctgcttcttcatgtacacagcttagacttagccaatcaattaatccaatatccttcgttaatcttcagtatttatttaaaaaatataccaataaatcgatattataagtaaaactaaaaaacataacactttgtttataaaaacaaaataatcctaaaggagtatagaattttgattaaaaaacactccaagctttatttttatacagtttttgaaaattttccattcatttttaatataaaaagtcaattgtaaattaggcgaattttgccaatgcaaaatgtcaatcaatatgctagaacagtactaaatattaagaaaatatttttgttcaataattataaaaataaaaatagatcaacgataatagaatccagcatttgagatactttttgcccatacttaatttcaacaaaaaatgtcgtttttctcatcattttttcacacaatgttctttaaatatggcataatttgaaacaattttagggttttattttcggtattttttttatgaatctggagcgggtagatcttaatctattaatatatcttgatgttcttcttcgtgaaaaaaacgttactcgcgcagccgaacagcttggtgttactcagcctgccatgagtaatattttacgccgcttgcgtaatttatttaatgaccctctcctgatccgctcatctgaagggatgacaccgacagaacgtgcacttgaattacaaccgcgtattcgtgatgctctttccgacctttcaatgattttggaaccgcgtaccgaattccgcccttataccagtaatcgcgttttccgtattatgacttctgactatgcagaagccaccctagtccctcgtcttgttaaagccctccgctcagaagcaccaaacgttgtactcgattttcttactccaagtgatgtgtcatatagagacatggaacaaggtaaagttgatctagccattaaccgcttcaatgaaatcccgcaaagcttccatcaagttttggtttggcgtgatagctttagctgtattttaaatgacaaacaccctgctgtgactcatttaaatctaaaaagctatttagatgctcaacatatttgggtatctaaaacgggtatgggtgttggctttggggtaaacccagataaacaaggtggcttgggctggattgatcaagcattagaacgtattggtcaacgccgcaaaatttctgtatttacgcgtcactatcagatgccggcattacttgctcaaaatgttgacttgatcgctactcttccaactcgaatggcacgtttacaagcacaaaatccaaaattagttattaaagatccaccgttttacattcctgagtttgaacttaaaatggcttggtgtccattattgcaccatcacccagctcatcgctggttacgccaactcattctatttgttgctcgccaaatgatcgaagaggaaaatcgtgaattcctgactaataattcacaattttcccactattaaataagttttaatttaattgtctctttcaaacattatctttaagcgctgagcaatcaatctgattacctcagcgcttttttgtgttaaaacatagtcataataatgatgatcctcgggtgatttgtgagtctctttcaaaatatcattatcatcgtactgctcatcatcgcagcaggctttttatctttaactgaaattgctctagctggtgccagaaaagtaaagttaaagattttagccgaagctggcgaagaacgtgctcaaaaagtacttgatttacaagaacaatctgcagacttttttgcagcgtcccaaatcggcttaaatgctgttgcaatcttaggtggtatattgggtgaagctgcgtttcgtcctttttttgtgaacttagttgaccgtttctatgaaggaccttggacgcaaaccattggatttgccctatctttcacattggtaacttctttgtttattttattcgccgatttaatgccaaaacgcttggcaatgatcgcacctgaaaaaattgcaattagtgtaattaaccctattcagatttttatcaaaatctgtaagcctttagcatggggaattaatgcaattgccaatttgctattccgcttgtttaaagtaaataccacacgcgaagacaatattacttttgatgatatttcagcagtgatggatgcaggtgctcaagcaggtgtactacaaaaacaagaacatcactttattgaaaacgtatttgagcttgaagaacgtacagtcccatcaagtatgacaacacgtgaaaatgttgtttattttacgcttaacgagcatgaagatagcattcgccaaaaactggcagaatatccttattccaaatttctggtttgtaacgaaaatattgatcaagtgattggctatgtagatgctaaggatattcttgtacgtattttaaacaaccaatctttaacccagctcaatgaatcgactattcgtacggttctaatgatacctgatactttaacactatcagaattactcgatcgcttccgctcaacaaaagaaaagtttgctgttgtaattaatgagtatgcgcttgtcgttggggtaattacgctaagcgatatcatgattactgttatgggggattgggttacccctatggaagaagaacagcaaattattaaacgtgataataattcttggctgattgatggtagtacacctattgaagatcttaagcacgcgcttgaaatggatgaactacctgatgaagagaattatgaaacattagctggtttcatgatgtaccgtttacgcaaaatcccacgtccagccgactttgttgaatttggtggttataaatttgaagttgttgatgtagaccattttaaaattgatcagctattagtaacacgtgtattagaaaaaaatgatttaccttctccacctgatgaaaattgatttattttggtgcaaaatatcctgcaaatgcaggatatttttttttgataaataatttattccttttaagataattattatttttaaataattttatattaaaagttaaattaattatcctaatcacaatttcaaatatataaattaactcattcattaaaataaaaaaattaaattgaattaaaataaagttttgcacataaaagatttacagattcactttcgttatgtaacgtagggagtagaaactttgtaaatgggtatacttctcatttcagtattcaaacagaatataatttttaaaaatacatgataatttcaaacatgataaaggttttataagtatatataataagcactatacattataaatagattataccattattatatatgttcagtatttcttcaaaatatacctttccaagtgaatatatattaaccaaataaactaaatatattatttgtctttttaataaaaattcataagaataatcgaggtcagagtttttgaataaacttgttcagtaaaactaaaggcaaaggattgattgtatgctgacattacttggtgttggcatgattttatgcttcatgtatttaatcatgtccaaacgtttaagccctattattgctttaattctcatcccatttattttttctcttattgcctggggccttggtcactactttgaaagcttgagccatattgagcttaaaggtctcagtgaaatgatgttagatggcatcaaaaaacttgcgcctactggcgtaatgctattatttgcaattttatattttgccttaatgatcgatgcaggtcttttcgatcctccggttaaatggattttgaaaaaagttaaaggtgaccccctaaaaattacattagggaccgtttttttaactacattagtctctcttgatggcgatggctcaaccacttacatgatttgcgtggcagccatgctccctctttatcaacgcctcggtatgaatacactgatcatgacagcacttatgttgttatgtagtggtgtaatgaatctgaccccatggggtggtcctactgcccgtgcagcaagtgcgctccaagttgacccaagccatatctttgtaccaatgattcttccgatggtgattagtattggctggttattcttcttggcatatttatatggtcgctatgagcaaaaacgtttaggcgtgattgagcttgaaagtcaccatggtgacaacattacagtttcaaaagacccagaagcaactcgtccacatttacgtaaagtaaatatggtactcaccattcttcttatgattgcattgatcaaaggtattttaccgatgtcagtgttattcatgctggcgttctgtattgcaatgctcatcaactaccctgatgttgatatgcagaaaaagcgtatcgctatgcacgcagacagtatcttggctgttgtaggtttaatttttgcggcaggtatttttacaggtattttatctggtacaggcatggttgaagccatgtctaaagaatttgttgcaatgatccctacaagtatggggccatatctagcgccaattactgctctggtgagcatgccattgacgttctttatgtcaaatgatgcattcttctatggtgtattacctattcttgctgaagcagcttcacattatggtattagcccagaagcgattgctcgtgcatcaattgtaggtcagccagtgcatttgttatcacctctcgttccatcaacctacttgttatgtggtcttgctaaagtcgactttgcagaccatcaaaagttcacttttaagtgggcatttattacttgtatggtgttaatgggtacagctttagtgattggtgttttcccactttttagtacgatgtaatttgctctactataaaaataaaagcccctatcggggcttttattttttatttttattttttatttattatttattatttatttacatactcaatcatggcgtctaagaacgcatgaaagtgcaagctaatatcttcttgtaaaattttataggcattatcaaattgcaccattggaaagccttctttccaaaatgggaaaatattatgcaagtcatgagtaactattgcatcttctcggacaattgcttgtgaaatttgtgccaaaacttgcgctgtctctgcgccatcaacagcaagataatcaataccacgcgcttttaaaatacgaattcgatcttttttatagcgaatttttttagcttgagctgcatttaaacctagtgcaagagtaactgcctctacaaacttctcttcaaaatttgtatttagtgccaccaaagcctgcttatgtgcttcctgacgtcctgctttccccccgttacggatgatctcattggcttccgtatctagcttatcttttttcatcgactgtaaaatgtctaaaatttcgatatcgcttaaagattcaggagattgctcaaacataggagtctctatacatacaactaaaggcgtattctctcataaaagcgatactaaagcagagtaaaatttttaatagcatattatcttgactatttttatagtcctaatctcagagactacactcataaaatccgttaattctttggtcatgattttaccatttgccaaattaattttaccctgataatattattttaccctgataaaaatatgcggctaaaatgaatactaaaatcacctatactgctttcactggaagcacgcttattgcgagtgactcccttgttgaacttgcaaagaaactaaaagctcttcctaaaacaacagaaaatattctgatttttaatgatcaaacaggtcaacaaattgatcttgatctttctggttcagaacaagaacttcaacaacgttatgctgaaccggaagaaattaaaaaagttggacgacctaaacttggagtaatttcacgtgaaatcactttacagaaaaaacattgggattggttagatcagcaaagcgcgagtgcatcagcagtgattcgcaagttaattgataaagagttaaataacccaaattctgaaggcaatattatgctagccaaacaagctatcgaccgctttatgtctgctatgttaggcaatatgccaaattacgaggaagcaacacgcgccttatatcaaggtgatcgagatatatttttaaagatgattcagagctatcccaaagatgtaagggaatatttaactttaaaaactcaaaatattttctaaactcaataaaaaaacccgcttacgcgggtttttagaacttattttcaatctattaaagacgaactaattccacaattttctctactgcttcttcaatcgtttcagcagttacctctgtatctataccatccacagaagttgtgataatgacaacacccgtctcacgtaatagaaccaattgctcagctgttaagcttgttttcgcgatcgcaactacaccttgctgaatcagcaaactttctaaagcttgagctttttcaattaactgtgcagaaacaccaataacagcaggtttttgacctaaacgagcagcacgatcttcagcagtaacaggattactatgagccgtccactctaccgcggcttctaccatgcccgcgccaacagttacgttacttaaacggtcaataaaaataaatgaacctgtgtaacgtgaatcttgataacggtcaaacacgactggagcatcaaactcaaccacaacatctgcaatcgcatttaactcaagctcttctacttgagtgtgttcgagcgtattcacatttacacgatagttaatattagttacttttgctggaacagtttgtgtaccaatcttaatattgtacaacttaccttttacaagtgggtgttcattcatccataccactgaagcacgaacacttcttgaaattaatggttgctcgcctgcacgtactaagacattaccgcgactaatatcaatttcatcatttaacgttaaggtgactgcttgacccgcaactgcctgctcaaggttaccgtcaaaagtaacaatttccttaactgtagaacgcttaccagaaggcaacgccacaatctcgtcaccaactttaatttcacctaatgcaactgtacccgcaaagccacggaagtcgagatttggacggtttacatattgaacagggaaacggaattcatgtttacttgactcgcggttgatttccacagactcaagaatactcattaaggtttgccccttgtaccaaggagtatgagctgatggatttacaacgttatcgccatttaaagcagaaattggaacaaataaaatattggctggacggcgatcacccaattggctcacgaacgcatcatattcaacctgaatttcattaaaacgttcagatgaatattcaaccaagtccattttattaatggcaacaacaatatttttaattccaagcaaactcgcaataaacgtatgacgacgagtttgagtttgtacaccatagcgcgcatcgatcaggataattgcaagatcagcagtcgatgcacctgttgccatgttacgagtatattgttcatggcctggtgtatcagcaataataaacttacgcttttcagtcgaaaaatagcgataagcaacatcaatagtaataccctgctcacgctcagcctgcaaaccatctacaagtaatgccaagtccggtgcatcacctgttgtgcccactttcttactgtcacgtgttacagcttgcaattgatcttcataaatcaattttgaatcgtaaagtaaacgaccaattaaggtacttttaccatcatctacgttaccgcaagtcaaaaagcgtagaaggtctttttgttcatgttgttttaaatacgccagaatatcttggctgattaagtctgattgatgagacattgctcaaactccacaaatttagaaactgtcttagaaatagccttcttgctttttcttttccattgagcctgcttcatcatggtcaatcatacgaccttgacgctcagaacttgttgccaacagcatttcctgaataatttctggcaatgtatcagcttcagactcaactgcacctgttaatggataacagccaagcgtacggaaacgtacagacttcatttgcggaacttcaccctcttttaagcgcatacgttcatcatcaaccatgattagcgtaccactacgctcaaccacaggacgaacagcagagaaataaagaggaacaatttgaatattttctaaatagatatattgccagatatccaactctgtccagtttgataacgggaatacacgaatactttcgcctttgttcactttaccgttgtaaagattccaaagttcaggacgttggtttttaggatcccaacgatgtttactatcacggaatgaatacacacgctctttcgcacgtgatttttcttcgtcacggcgcgccccaccaaaagcagcatcgaactgatatttatccaaagcctgttttaaagcttgggttttcataatatccgtatatttcgaactgccatgatcaaatgggttgattcctgcttcacggccttctttattctgatgaacaattaaatcaaaaccatgtgtttttgccatgttatcgcgaaacgcgatcatgtctttaaacttccaacccgtatctacatgtaataaagggaaagggagttttgcaggataaaatgccttcaatgcaagatgaagcatcacagccgagtctttaccaattgagtaaagcatgactggattttcaaattctgcggctacttcacggataatatgaatactctcagcttcaagttgcttgagatgtgtaagtcttgattcagtcatgaacacgcccttctctatccattttgcccataaaatctagaagcggtattacaccaccacttagaagaccatgtggaggaacgagtgccataacaactccaatttttcgtgataaatagtccaaccacaagcctttatatggcttatagcattagttatgcattatagtgatttaaaaccgattccttttgcttgttttttcatattgatattcaaattcatcatatacatgtaatatgctgattcacttatacaactttgtaatcctagcttgtgtagtcgacttaagcaaatcatgttctagtctttagatttctttaaaaaccataaaaaaagagaagcctctgtagcctctctttcttattataaggttaactaaaaattagaaaccaaacattttacgctctagaggaatttccactccaattgatgcacccgcatcattaccttctaagtcagaatcacttacccaaccattaatttttaatggaagatcaggtttgatgtaatgtgtccaagttagatcaagcgctttaatttcatcatctttagggaatgctttattaattgccaagttagattggttaactttaaccaccatagcacgaccgcttaaacggttcatcacgtcaaagcggatatcaccacccacagaatacatttgtccatcgccacccatcgcatggcctaatgggaagccatgttggtaataaccatctttataaacataatgattataggaaatacccttcacatcattattagtgcgggtatcagcccattctgcataaagttgatatggcatattattatagctagaagaatagtcgactcctgctaaatacatttttttagaaggaagtagtccagcttcatcttcaccaacatattgaccataaataccaacaggagcatttataagagattgtagatttaaacgagcatcaaaacctgcgatttggttagaacgatcttcatcagaatcatacacattgtcattccctttaattgcattccacaaagaatcccaactttcagaacgtccttcaccaccccattgtaaagtacgagaagcacctagttctaaatagggtaaaggtcttgcagttaaacgtaagcctaataatttcgcatgaggaacagctttataatcatctaattggcctgcaaaagcttgatattgccaaggtccaatccaagataaccattttgtctcaaaagcattttgtacagctctttgtgccgtcacgccatacacaggacgacttgcatcgcctcggattaagctaccatcatgtccaggtccccaccatgttggaatttgacctgcaacaagccactggttccagagtttaccagcgacatatgaaccctcaacgttaacgtcatgcccactatcaatttgagggtctttttctgcgtttacacggatttttgcatcccaattttcaccaccagcattaaactctaatgaaccttggtactgcgatttttggttatcaccaaatgcttgaggaatatttttgatatcagtttcagcaaaagcacccactttaactgtatcgttatctgcctttaatgcattgagaactgaattaataactttttgctgtgctggatgagtcactttagcttgagagagagctctttgaatttcatcaccacttaatggccaagtagaagtgctgatgttaataacaccttgttgattcaaccagtttaagtcggtacgtaaatcatcattattaagcactaaaccttgtgcaaaaacagccgatgaagcagttgctaataatgcaatcgaaagtgtttttcttaaaaacatgtcagcacaattctcaaagttatttatgagcaacacattaatttttttatcgcaaatttgcaattgttaaactgtgcaattacattttttaacggtgttttaagttttctataacttaagtattttttatatataaatagttaataaaaaaggcagtataaactgcctttttctgtattgaagattaaattaaccttctttacgacgcatatgcgggaacaaaatcacatcacgaatacttggtgcatctgcaaaaagcataaccaaacggtcaataccaataccttcacccgctgttggaggtaaaccatattcaagtgcttcaacaaactctgcatcgtaatgcattgcttcatcatcaccagcatctttttcagcaacttgcgcttggaaacgttcagcttgatcaatcggatcatttaactcactaaagccgtttgccaattcacggccaccaataaagaactcaaaacgatcagtaatgtgcggattatcatcattacggcgagcaagtggagaagtctctgctgggtactcagtaataaaagtaggctgacgaagtttagtctcaaccgtttcttcaaatacgattgtttgaagcttacctaaaccaaaaccaggtttaacttcttcttttaattcctcacgaacaaattttgcaaggaattcacgatcgcctacattttcaggtgtgaactgcggattattctccaaaatcgcatcaaacatagagattttcttgaatggccctttaaagctaaacacttcgccttggtaaggcacatcagtcgtacctaaaatatcaattgctagcttttcaagcatgttttcagtcaaagccatcaagtctttataatcagcatatgcctgataaaactcgatcatggtaaattcagggttatgacgtgttgataccccttcattacggaagttacggttaatttcaaacacacgctcaaaaccaccaacaactaaacgttttaaataaagctctggtgcgatacgtaagaataatggcatatctaaagcattatgatgcgtctcaaacggacgtgcagacgcaccacccggaatcacatgcatcattggcgtttcaacttccatgaaacgttcattggttaaaaatgcgcgaatacctgcaacgactttggcacgaatttcaaaagtcttacgcgtttcttcattcacaattaagtcaagataacgcttacgatatttaacttctgtgtcgttcaaaccatgaaatttatccggcaatggacgaagcgattttgtaagaagttcaaaaccttcaaggtgtacatataagtcacctttgccagaacgaccgatataaccttcagcagcaataatatcgccaaggtctaaacctttaatagtttcaagcgtatcttttggtaaacctttacggtcaacatataattggatacgaccagtcatgtcttgaatcaccatgaaagaaccacggtttaacatgacacggccagcaacttttacataaacatgttcagcgctttcgatttgttctttagactgatctttaaattgttcttgtaaatcagcagcgtaatgttcacgtttgaatgtatttggccaaggactctttccagtttcctttgcaacatcttggatttgctttaatttggcatgacgctgtgcaattaaatcgttttcggaaatagttggttcagaagtcgattgagcgttttgttgcgtcatctctgcctcggttaagtaaaaatgaagtggcatagcttaacagattgctgaggtttttcgaacgatttcaatcaaacaaaaacgaaaaaagtccaagccgtcaatctgagtggacattgaatgataaaaattacttagaccaatcgctaagttcattttttttaggtttgagtaaaatataaaaaaatccaaataacctcgatttgaaaaggccctatttgccttttattttatctatgagattgtgtagtaaataatgaaaattctatttttacatggcttggattcttctcgtgaatcaacaaaatttcatgccattttacatcctgaaaaattttgtattgatgttgattatcgcaacctaagttatgcttcagttaaagacttttatcatcaagcgattgaaacaattaaacctgatttgttagtcggtcatagcctcggcggttattgggctttgaaaactgctgctcaacataaattagctgttattgttgccaacccaagccttacacctaattttcgtaatgattaccctcacctttgtgacgaagatcttgaccactctaaccctaaaatggcctatttagagttaggagacgagcaacttgatatgtatcaagtacaggaaaagctgtcaccatatatgacaatagaaacttatgacggaggccatcatcgtcttgcttatccttctcgtcttaatgatctcattactaaaattcataaaaaatattttgcttgaatttacgtatgacgcataattttcaaaaaacttattatataaaaagataacaaattgaattacagaaacttatttttcagccatttgttttacagcttcaaagccttgaacgaagccactttttaacataccgatatactcaggtaaggtggctaattctacttttaccgttgtagtatccccattttgacttaaaaaatatttttctagcgaaccactccagcttttcacctcttcactttccaagtcttctttcccgtctttaatcattcctaaatgtttaaaaattagtacttcaggctttttcatttcttcaatggtcgaaaccattccatttccttctccatctagaaaatatgttttaccaccgactttccaatctgtgcgcattgaagaatctggagcaaagaatttcgtccatgcattataggtctcactattccagagtacgtcccatactttttctataggagcattaatttctacttcatatattagagtttccatattcgaattcctttttctccgttaattaaatgttcaataaacttttctgttttatataaacattaatttatttgtccatttattaatcagattacttttttaagaactttatttatataaatgctttgctctttttgtaacccttcatatcactcatcgtttccttgcatgaataaactcttaaaaatatatgatttattatgtgtttatgttgaagttttgcctaaataaccatttatttgtctcgatatgccattcatctttgcttatgaatgattaaactcccttatatgctttactttaaatgtagaactgcgtaaaaatttgatatccgatcaaagcgacattagttattattgagcggatcgtagttacattattaatagatggaatagttttactgaaaggcagctttgagcaaacttatcagtgcggagagtctcatgaaaaaatatcaatgtatcgtttgtggatggatttacgatgaagcagaaggttggccacaagacggcattgcagctggaacaaaatgggaagatattcctgatgactggacttgccctgattgcggcgtttcaaaagctgacttcgaaatgatcgaaatctaatgtcttaaattaaaaggccatgatttacatggtcttttttatatatcaccaatcaccgttttaaattaacaattctaattctggagaaaaaaatgcatccaatcgtcattatcggatcaggcatggcgggttataccttagcacgtgaattccgtaagcttaacccagagcaagaacttgtgatgatttgtgcggatgatgcggtgaactatgcaaaaccaaccttatccaacgcttttgcaggaaaaaaagccccagaacagattccattaggtgatgctgcaaaaatgagtgcccaactcaatatgcgtattgaaccttttacttgggtgaaagaaattttagctgagcgtcatgaacttgttctagaaaaagacggcgttatttctcagcaatcctattcaaaattaattttagctgtcggtgctaacccgattcgccttgctattgctggtgatggtagtgatgacatccatgtggttaactcactcattgactatcgttctttccgagaaaatctagctcagcgcaaagataaacgtgttgtgattttgggtgcaggtttaattggttgtgaatttgccaatgacttacttcatagcgaatatgatgtaacagtaattgatttagcgcctcaaccattaggccgtttattaccttcacacattgcttcagcattccagcagaatcttgaagaagcgggtgttaaatttgccttaggcacaaccgttgaaaaagtaagtaaaatcaataatggtgaagattacgcagtcacattggcaaatggtcagactttggtcgctgatattgtgctttcagcgattggcttacagccgaatatttctctggctcaaagcgcaaatattcaaaccagccgtggtgtgattaccaatagtttgcttgaaaccaatcaagcagatatttatgcgattggcgactgtgcggaagttaacggtaccctacttccatatgtaatgccaattatgcaacaagcccgtgctctagcaaaaacattaagtggtcaacaaacaaatgtacattaccctgctatgccggttgcggtaaaaactccggctgcaccgcttacagttttaccggcacccgttgatgtggatgtaaattgggaaactgaagaattcgacgatggtatgcttgccaaagcaattgacaatgaaggaacattgcgtggtttcgtattgttaggtgcaacagcaggcaagcaacgtttaactttaactaagcttgttccagatcttattcctgcccaagcataaggtttaaattgggaatgctcatgatcttgagtattccttcaaggaatgaataacatgaatagcgccttacaatttagtatttcaccgtacactccatttatgcaggaaaccaaagtcaatttaggcaatggtatcgagctacatgtagaagtaggtggaaaaccagaacatccgactattttgctgattatgggtttaggtgcccaaatgctattttggccggactttttctgcaaatcactcattgatcaaggttttcatgttattcgttttgataaccgtgatattggcctttcttcaaaagtccgccatcaaggtaaacgtttaaataccatgaaattgatgggacgttttgctttagggctaagaaatcagggtgcaccttatacgctctatgatatggcagatgacgtttctatgcttctcgaccgtttaggagtaagcaaagcacatgtgattggtgcctcaatgggtggcatgattgcccagattctcgctgcaaaatatccggaaaaagtagaaaaattaggtttgatgtttaccagtaataatcaaccgtttctaccaccaccattccctaagcaacttttaagcttgattggcaagccagaatcacgtgatgaagaaggaattgtgaatcacagtttaaaattattccaattgattggttctcctggttatattaaccatattgaagccgttcaaactgcaagaaaactttatcaacgtagctactatcctgctggtgtacttcaacagtttttagcaatattatgtacaggttccttactgcaactggaccgtgaaattaagcaacccactttagtcttgcatggctctcgtgaccgcttacttccaccgagtcacggtaaggccgtagcaaaagcaatttccggtgctaagtttgaattaattgatggaatggggcatgatatccctgcccattttattccacagcttagcggtttatttgcgcatcattttaaatcatcatactaggacactatggctgcattaccctcactaagacagctatcatatttagttacgttgtcggaaactttgcattttactgaagcagcacgtcgctcttttgttacccaatcgactttatcgggcggcattatggagctggaaaggctactaggtggcgttctggttgagcgtgaccgtcagaatgtgcgtttaacgccattaggtgagcaagttgttgctcgagcccgtgtattgctagcagatgctcaggatttaatgcgtttaagccgtgaaatgagtgaaccattaacaggtgatcttcatttgggtgttattccaacaattgcaccttttatcctgacacggttacttgatgaagtgcatcaacaattaccgaagattcagttgcatttacatgaagctcaaagtgagaagattgtagagcgcctagaacatggtaatttggacatgattgtccttgccctaccttttgatacaagaagtttaaaagtagctgaaatttcaaaagaaaatttatatcttgtttgtagtaagcaagatacaaatgcacttcaagcaaattcacttgatgatctcgatttatcacgtctcattttgcttgaagaaggccactgtttacgtgaccacgtattaagcgcctgtccaattggtgagcgtaaaaacgataaccgcttaaaagcaagttctctaccaacattggttgaaatggtttcttccgatttaggctttactcttttaccagaaatcgcaattgaaaatagtatgatcaaatttaatgatcagattactgcaaaaccaattgaagacgcacctagccgtactttagcacttgttactcgtaaaagtacgccgttgcaaagtgagtttgatgttcttctgcaaatcatgcagaaaattaccacaaacttacatgaataaaaaaaggagtcttcggactcctttttattttactgtgctgttagagaagcccatttaaatacccaagccgatctcaaatccaagctatcatctgcaattattttttctcgaataatttgtgcaattgcgtagtcattggcagggtcgaccatgactcgtattccttttgtagttgcgctggtaacaactttataccctttagcctgtaattgggactgaatcatatttgctttattttgattaggtgccaaagcaacttgcaccatccattttttttcaccgttttctaaaatttctttcgcgaccgctgcatcaagttgctttttcttctcaatatttttcttttcttcaattttttttaactgattatcgtcaattttcttttgtgctaacaattcctcttgagtaagttttcttttctgaatcacgattgtcttatttggtgtgtcattcttcttatttttctctctagaaggatgtataaaataaggatatatcatttgatcatcaaatttctgaaatacaataatatctccatagcacttctgatccgcataagcagtcactggcattaaccccaaaaatattctaataaataaacttttaataaagtcttgcatattattcacttaccaaagttaagtatatttaatgcggcgtattaaagtagatttcttgtgatttgtatatttttaaaatccaatgttttatgtaaagaatcacatatttttcaaacatattgccttaattcaaattattgccgtttatcctacaaccatttagaaaaattaattaaattattatgaaattcagttaattaaaaagccgacatgatgtcggcttttttaaaaataattttttatttaaaagtttttaataattctctttgagcattatgcaatttttcgcctgcggcaggctgggcacgtacccatgtaccatcgccctgtaataaccaagcttgctgattatcttgtaaataattaaggagtccttgctgataaatacgttttttcaaagcaggatcttcaattgggaagcatgcttcaacacgattaaataagttacgatccatccagtccgcacttgaacagtaaatacgagcatcgccattattactaaagtaataaactcgagtatgttcaaggaaacggcctacaattgaacgtacccgaatgttttccgataaatttggtaatcccggacgtaaacagcaaatcgaacgaataatgagatctacctgcacccctgcttgagaagcttcatacaatttattaataagctgaacttcagttaaagcatttaccttgacaataatttgggctttacgaccagcctttgcattggcaatttcttcatcaataaagttgatgagctgagcatgcagagtaaaaggtgcatggagtaactttttcagttttgccattttacccatacccgtgagctcttggaaaatacggtgtacgtcttcacacaagtctttatcggtggtcattaggccgtaatctgtataaatgcgagcattcatagcatggtagttacccgttcctaaatgaacataacgcaccagtttgttgttttcacggcgcactaccataatcattttggcatgggttttataacccacaataccgtaaacaacgactgcccctgcttcttgtaaaacgttagccacttcgatattcgactcttcatcgaaacgggcacgtaattcaattaccgccgtcacttctttaccattacgcgcggcttctgctaaaacttgaacaatttccgagtctgcgccactacgataaagtgtctgtttaattgcgagtacttgcggatcacgtgctgcttcacggagtaactgaataacaggtgcaaaagactcaaatgggtgatgaagtaaaatatcctgcttttgcatagccgagaaaatactctcggtctttttaaatacttttggtacgactggcgtgtgtgaatcgtaacgcaaatgagggcgtttaaagttcgaaaccagacgagccaagtttacaggaccatcaactttatataattgttcttcgtttaagtcgaactcttcaagtagatattcataaatatgctgtggacaattttgggttacttctaagcgtactgcccgaccaaatcggcgtgaacttaactcaccttttaacgcttttgccaaatcttcaacgtcttcattaagtgccaaatcggcattacgagttacacggaattgatagcaaccagttgcagtcatgcccgggaacaagtctgaaacatgttcatgaataattgctgacaacatgacgtgatgttctttaccacccgttaactcatctggtaatcgtacaacacgtggcaatgaacgtggggctggtacaacagccaaatcaatttgtcgcccgaacgcatctttaccttctaaagtcacaataaagttaaggcttttattgactaaacgcgggaatggatgggctggatctaaactgattggagttaaaacaggcgcaacctgttcctgaaaatatttttttacccaagctgattgagctggtgttaattcaccacgacgtaaaaagcagatatcttcttcacgtaacttaggtaaaatttcttcgtttaaaatacgatattgacgctcaattgcagcatgagcagtttcagagattttttgtaagacttgtcttggcgttaaaccgtctgggcttcgactttcattgcctagagcgaattgctccataacacctgctacacgaatttcaaaaaactcatctaaattacgcgaaaaaatgagtaagaaattcattcgttccagtaatggatgtaaagggtcgacggcctgttccaatacgcgcaaatgaaagtcaagaatagacaattcacgattaatataacggtcattataactatattctgttggggtcgttgctgtaatcgctgtattcatgtctaacctaatctctttccaaccaaaatctctgcaaaatagtatgctgcaaaattatgtcaatttgataaaaactaaaaaaataacacatctttaagacagtgttattcaggaatctgggtgctattcatataacgtaaaataacgcgttttctatattgtagtttacgatcgttgcgatgatcttgataatatttcggatcaggcaataacgcggctaaaaaagcagcttgttcgcgagttaagcttttggcacttttgccataataatattgggccgctgcttcaacgccatacaaatttttgccaaattcaacagagttcatatacacctcaagaattcgacgtttcgaccacatgcgctccatcatccatgtcgctacagtttcttggcctttacgaataaatgaacgtttattatataagaacaagttttttgcaagttgttgagatacggtagaaccaccagcaacaacctctccttgctcattgttacgctctagcgcaaaacgaataccatcccagtcaaaaccatgatgatgaataaattttgcgtcctcccctgctaaaattgcatgtttgaaattgtcactaatatcatcatagtcaagccattcatgaatgatcggctcagatggatctgaccaataatcaattcgcataaacatggtggtatcaacttcatgtgtacgccaccaaaccaaacttgaaaagatccaaagctgaataaggagaattgccccaataaaaattaacaacacgcgaacaataaaggctttcatgttcgtcctgatctcctgtattcaacttttttcatgttaagctgtaaagcatgttcatatataacaaaagcatagcatgactcaatatcagcctccgcacattaatcgtaaactcaatgtacaagcttggtggctgaccgccctactgatctcgattaatgtaggtttgttcatctggcaaattatatctggagtggacattagtgacccagctataaaagatgcacttcactggggtgcagattttacaccacttactttttccgggcagccagaacgtctatttaccagcatgttttttcactttggtattattcaccttatgctcaacatgtgggctttatatatttttggtaatgtcgctgaagctttatttggacgtttatactttattggtctgtatttacttgcaggcttgtttggtagccttttgagtagttatattaatattcaaaatgggcatgaattattacaacattttgatcagagcttacttccccatgtcagtgctggtgcttcgggcgctgtgatgggattaggtgcagcattaactgttctttctttatttccgccgctgcctcatcaagcttatatacttgataagaaatcattattaatgattatggcgattaaccttatattcggtctggttgccacaggtattaataatgctgcacatgtcggtggtatgattatgggtgcattactcgcactgatttggtatttaagctaccgcactccatttaaaaccctcctaaaatttttaggtctattaggaggacttttaatgactgtgggcttctatgcttactgtaatcagcttaactcaccattacttccactttggcatgaggttttaattcagaacccagaaatactcccctaacttaaatttggttcagctcacgtaaactttgtagtggcggtaaattacaaagataaccgagtctatatcggccaatcagagcgcaaagcaacatcatagcaagtggtaaaatcaaccatatttcaatatgccactgtaaagccatattcattttataacttgcaatagcgctaattacctcggcaaaacagcaggcaacaatgcctgctaacaaacctaaaaaaccaatttccagactgagcatctgcttcattttatttttagagagaccaaatgaacgcaacaaagccacttctcgacggcgttcatccattaatagatttaaacaagcaattaaaacaagtattccagaaaagccaactaacgctgcaagcacagtcacgattttgactagaacattcattaagcgctttacttcatctaaaattcgatcaacatcaataaaaaccgtattggagaattgctgaatcatatggatcattttaggttgatcttgcttaggtacataaaaactgcccaagtagctaccagcattttcatctaaagttttaggtgaaaaaataaagaaaaaattaggactaaagctttcccactcaacgctccgaaaatttataactttagcttgcaagctaccttctggcagactaaaagtaagcctgtcaccaatctggattcctagactttctgctgttttactctcaactgaaacttggcctactgcattaaattccgcttgaccttttgtaatgacattgtcatttggtaaagcactcgactgcgttaaatttaattcgcggcgtaaagcattattttgctttatggcttcttctgaaaaaggtacatcattctttgcgagtaaccgcccacgaatgtttggatataatggtgtgctttgccaaccattttgctttaactgttgctcaaaggcttttaaatcaaatggtggtagaccataaacaaactggtttggtgttccctctggtaattgctgttgccaacgctctaataaatctgttcttaatacacttaacacggtaatgaggcttaaacccaaagccagtgctgtaatttgtaaggcactttgcgatgctgaacgaatataaaaagacaaacgggttttcatcttttttaaagcacggagcaatagccagacaacggtgtaaagtaaaatgcaaagcagaataatcgctgttagtacccaaatactgagcattaaattttcacttaaaactaagctaaaaataacaagactggtgatgcctgcaaaaaacataaagaataatgattttcgggattttgcctgttcccgaataacacggatgggaggagtatttaacaactcccaaatgcttggcaaaatgaatccaagtagcacaattacactggtaaaaatggcaattggtaagggaccaagtaaaaaaccaaccacagagaaacttaactctagttgtggaatcagttgtagcatgagctcaagcaagccatagcccatcattattcctaagagactaccgatcgcaatcgaaattgcactgactacacaaagtaacctgatataggcccataaaatttgaaacttactcgcacctaaacaacgtattaaagcaatgtgatcttggttttgctgaacatatctttgactcgttaaagcaatggcgataccacacaataaaattgttaaaatattggccaattgcaaaaaggtatctaggttttctaacggacgtaataatctgctatttgattcactggcatcgcgtaaacgtaaccctatggtttcttcctgttcatttgcaggttgatgctgttgcttaaattgccttgaaaatgactgaacctgttcaggctgaccagacattaacagtcgataatcgattctactaccagtttgaattgcatgagttttagcaatatctgcttgatgaataatgacagtaggcgaaaaaccagaaaaaccaagttcttgatttgaatctcgcacaatcacgccactaaagcgaaatgccgcatctgcaatagataccatatcgcctagtttaactttaagtaaatcggctgccctttgactcaaccatacttcacctggttggataccacgcgctataggttcaatctcaagctttcctcttaatgggaatgcaggttctattgcttttacattgaccatgacaaactgatcttgagtatgtgccattgaactaaacatggtcacattagtctgctttaagccaagctgatctgcccttttttgccattttgcgtctataggttcattattcgacagaaccaaatcggctgctaacatttgcgctgcttgtagacttaccgcatttttaacttggtcattactaaacttaagagcggtggttgcactgatcgcaagtgaaagcgcaataatgagtaaatataagcccccggtacgcaagctttgtagcaaaagtggtttgagaagattacgcataatttaaccaccctgtaccgtctttagtcggccatcatctaactcgacatgtcgttggcaaagtgctgccaaattacgatcatgtgtgaccaaaataagtgtagtaccaagctcccgatttaaatcaaaaagaagggtttcaatttcttgggcggtttgaccatcgaggtttccggtcggttcatcggcaaaaataatttgtggctcggcaatgagagcccgagcaattgccacacgttgttgctctccaccggataagaccttaggcgtttgttcagcttgacggcttaagcctacccgatgcaaccaatctaaagcttttttctcagcaattttataatcaaaatctttacgtaaccgaagcggtaacatcacattttcaagtgcacttaactgtggcaaaagctgaaaagactgaaatacaaaaccaatatgctgcattcgaatttgagcgcgctgctcttctgttaacttatgaaccgcctgaccacataaccacacctcaccttcaaagggttggtctaaagtcgctaaaatacccagtaaagttgattttcctgaaccagaacgtcctgtaattgctacctgctccccttcataaatatctaaatcaatattttttaaaatcgtaaattgattttggttaatctgaatagtttgtgtaacttgatgggcagcaatgataggttgtggcatgatgtgaacagtcctatatattgagtattcgggtcgaaacacaaatgtataaatcttatttgtttggttctaaaagtctcttgctcatctcattgagcatgttgcccatgttcgtctcggcaaaaactattttaattttaggagatagtattagtgccggttatggaatagaccctaaacaaggttgggtacaattactacaaaaacgtttagaccaacagtatcccaaacaacataaagtggtcaatgcaagtgtgagtggggaaaccactagtggcgctttggcacgattaccaaaacttttacaaacgtataaacccgaggtagttgttattgaattaggcgggaatgatggcttacgtggtcaaccaccacaaatgattcaaaaaaatctgtctcagctcattcaattaagccagaagcaaaaagccaaggttattctttttggtatgaagattccgcccaattatggcacggcttatagcaaagcattcgaaaatagctacaaaactgtaagtcaaaaatatcaggtgaaattgctaccgttttttcttgatggcgtcgctgggcaaaagcaactaatgcaaaatgacttgattcatccaaatacccaagcacaatcaaaattactgaatttagcttacccatacataaaaggtgccctataggcaccttttagtttcaaatttttctagactgattagaagtcaaaaaaagtaacttcaccagtttctagcgaatattcagcaccaacgacaatcagttcaccttttgcaattagattttctaatacagccgaaccatgacgtaattggtttaccgaagcaaatacgtttgaacgcaccgcatgacatgagagttttttcaagtcattttttaaatcagtctgcattaaaatctcaactgatggacgaacacggttcacaatcgacattaagttagaagatggcgggtgctcagggttcatcaacgtatcaatagtcgcttgaatcgcgccgcaatgactgtgtcctaatacaactacaaccggacagtcataacgttctgccgcgaactcaacactaccaacttgtgaaggtgcaacaacattaccagcaacacggattacgaataagtcaccaagaccttgatcgaataccatttctgctggtacacgagaatctgaacagcctaatacaattgcaaatggattttgatcctttgccatttcagcgcgttcatgatgtgataaggtttttgcaagggaagtatttccatttacaaatcgttgattacctgctttcaaacgatctaaaacttcttgcgcagtaggcattttatatttccattgttttttcaaggttagaaatcattttaatgtgtcaaaatttgaatgtcactgacaaaaaataaatcctttttcaggaaatttttttaaaattttaattaggtttataaggaagatcaccgcacaattgcctactgtttagtgaaaaaatagacatactttagtttatagattgactataattttcttgattccaaacgtttggcaaatgactcattggcaaagtttttcaataatttttcaaactcgcttaagcatcaaggatgaaatctatgacaaggctgtccgccccaattaaagcctctatgaaaaaaactgctactgcactgactttggcttgtagcttattgtcagtcatgagcatttctcaagcgcaggcagccgataatattgatgtcagctttcaaacaatattacagcaagaacgtaactgggcaggactgcaaagcaaaagcctaaaggtgggtgatatcacttggtcatatagtgaaggtggctctagcacaaagccaactttactactcattcatggcctagcgggcagtcgagataactggaaccgagttgcccattatctcacgacaaattatcacgttattattcctgacttaccgggcagtggcgaaactatcgtctcgcaagactttgattattcggttcccaacttagctgaaaaattacgtcgctttgttgaagccgccaatttaaaaggcccaattcatattgctgggcactcactcggcggatctattgccctactctatgctggacaatatccatttgaaaccaaaagtctatttttagtcgatagcggtggtattttccgttctgccaacacaatttatctaaaagatccaacctatctaaaacaacttttagtctctaaaaaaggtgattttaattatttattaaaacaaaccatgtttaatcctccgtttattcctaaagagttcctgcaagctcaagaaaaactgatgattaatcaagcacctcaaacccagaaactggttgatcaattgattgcactcaataaagtctataccccagattcctttgcggtacttactaaaacgattgacgcccctacactcattttatggggtaaacaggataaaattattaatgtagaagtagcaaacgagctaaaacggcttttaaaaaatgcccagcctccagttatcttagaaaacgtaggccatatgccaattttggaagctgaacagttggttatccaacaatacgtaccgtttttactgaaagtagaaacaaaccagtcgtcaaaaacgacaacaccttaaataaaacttccgatttgtgagaccttatgtctacccaacccattattgaaaaacttattgaagctcatctagattttttagatgagcagtttgctcaggctcaggtgatccaacaagagtttgagcagttttatcattggttggggagtcgacaattacaacacctttggacgtttgaacaggttcaacagctcattcaaaagcagattttagacacacccgcttcggattttcttattgaacagattgcggagcatatccgctttgcactgatccatcctgcaaatgacaccgcaactgttgaagacgttattcctgttttaaccattgatcgaattgcacaatatgttgccagtaaagaagagcaccgtaaaaaactcattaaaacaattgtgaataaccctgccttttcagcactgttgactcaattgattcagcaaacaatgcatgattatttagatgaatctatgtcaaaacgcgtgcctggtgtaggtcgttttatgaagatgggcaaatctgtattagaaacagtaaccgactctaatcttgacgataccattaaccattacttgcaaaagaatattttaaaactcagccagatgagtgagcgtgttttaaaccaacattttgacaatgataagctctaccattttcaggcaaatgtttggcataaagttaaaacctcgccactttctgttttaaaaaactatatagaagttcaagatttaacaaaaactgttggcctaggacatgaaatctgggaccacattcgtcaaactgattatctaaaacagcaagtacatgatggtatctatacttggtatgtacgtaatcaggaacgtaattttgatttgttgctccgtgatcttaatattgacgaaaatttagtgaagcatgaactcaccgaattgcttgtacccgtactacaacaattagtcacaacaggacatttaagacgtcgtgcccgtgtgtacttagagaagttttattattctgaaaaagcattagagattttaaataataaaggcgcttaaagcgcctttattattttattgattaaaaagaatattttaaagatgcgtaataagctcgacctggctcattataagtttggctaatagaattgctgtctcttaaaatttgtttatcaaacagattactcacaccaacacgcgtactaatttggtctgaaaacttataaccaacattaataccagcggtactataactttttaccgtacttggcttaagcgcagaattcgcacctcctgaacctataccggattcaagtctattctctgcaaattgacgtgatttttgacgaccatattgagtaaatacaaaatttacatccaattgatcagtaatgtcataatcaaaaattgagttaattgtatagattggaactaaagataatggattcccagtttgcttgtctttcgagtccatcatgtaggtaaagttattagtccagcgaatatcaccgaaatctaatcccaaacttccttcaaaaccttgaattaaggctttaggcgtattttcccaacgcaaaatattccacttcgtattggtcacagctcctgtatttgcatttgtacttgagccatcaactgttccaacaacatgagtacccgcaacaatcttatctttataatcattacggaaccaagttaagctcgcattcacgatatctttttggaactgaataccgagctctttgtttaccgatgtttcaggttttaaatcaccattaccttgtaataaacaacgcgactcaatattagcagggcagccattgccatttgtacttaataaatacccttcggcattttgatacatatttggtgctttataagcttttgctaccccaccttttaaagtgaaataatcattgagtttttgagtaatatttaagcttgggctccaattagaaccagatttactatggtcatcaaaacgtaaacctaatacaacatctgtgctgtctgtaactttcaggttatcttcaatatatgcagaagcaatacgtgactccattttactacgatcacctttcgctaattgatcgccataacctgaaccactgctgtctttaccttgagttgtcgagacattatctttaaatctgtcttcaacccattcggtacctacagttaatacttggggtaaatagtattcaaaaggaatattagcctcgccgttaaagcgaagagtttctaaacgcgaagtggctttatcatcaagattattaatttttccttctacacttcccgccaagccttcaggtagacgtttgttatgggtcttatcatattgagcaactaacttactcttaccccaagaccaatcaccttcgtgcgttaatgcatagctatcacgatacatggtattggtttctttaccaatcagctgtgaaagaatcgcatccgcttcagcatttgcatttaactgagagtcaccagaataaatattaccttgtttgctagaagaaatatcgagcaagacagtttgctggtctgttgcctgccaagctaaacggcctgaaatatctttatttttaacaccttcacggccagctgcggtactaccaattgatttattaatatcaacatcgtcagcttctgttttattataattaccatataaacgataagataaaacgtccttaattagtggcccacttacgttaaaaccaacacgatttgatgaaccttctttggagtcttcaggctgtgaagtatagaactctactgaaccatgagtttcattagtcacttttttagtaatgatgttaaccaccccacctgccgcaccagaaccatatcgagcagctgctggtccgcgtaaaacttcgattgactcgatggcttctgctggtacccagtttgagtcgcctcgtgtatcacgctctcctttccagccataacggactgaattacgagagttaattggcttaccatccactaaaataagcgtgttttcagggcccattccgcgaatatcaatttgtctattattaccacgctgcccagtagcactattgcctgtcaggttgacacctggcatacgacgtacatagtcagaaatatcattacgaactggtagtttttctaaatcttctttggtaataaccgatacaccgagcgattgcttcacttgctcttctgctgttacaaaaattgtttccaatttcacaggttcagcaggcttttctaatgtttgttcagcttgttcttgctcattttgtgcagcaaaagccatagacatcatacttgccagtactgaaacagaaagcactgactggataatacgcttcgacataagtattcccaatatattgatttattaaacatctctcattttcagtttcgcattgtaacaaagataaataaaattacaaatgatattgataataattatcattatttatattgtataataaaaaaacctcattccgaggcttttttatttcacttttcaaataatttaattatttgaaataagcaccttctgcttgtgtatggtctgtttggtcaaccacacgttgtagttcaggaatgtgttctttcaaagttgtttcaacaccttgttttaaagtcacatcaattgctgagcaaccttggcaaccgccaccaaatttcaatacagcagtaagaccatgttcagggtcatcttgcacttcaactaagctacagttaccgccgtgtcctgcaagacccgggttaatttctgcttgaagtacataggtaatacgctcttcaattgatgcatcaggccctacgcgcggcactttagagtttggagcacggaaagttaactgaccaccaaaacgatctttgttgtagtcaataactgcgtctaaaagataagggatagacggcgcatcaatatatgcagggaaatcaggatagtcctgtttgtaatccgtcggcaccacttcttctggtgcactatatgccatacagcactctgcacgtggtgtacccggatgttcaacaaaaattcgaacgccaattcccggagtattttgcttcgccaataattcgtgcaaatactcttgtgcagatggtgtaatcaaaaggttcggaatttcttctgcaacagcagtgttggtgttctcagtcgacataacaatattcctcaagctgatgcctttatattaaccgaagatgaggtggatttaaaaaaaatcaactaaatttgtcggatttatacacaacagggtttcaagttgtgtttttaatggcattattgccatcagtattgatcatttttaaatatttcttatgttgcatttgccgtttaatcacaccattactcttattattattacggtcattgtgtctttacttgcttttagcaatcaaaatgtcatgaaccgtttgatcttctggccgcctgcaatgcaacgtggacaatttgatcgattcattactcatggttttatccatgcagatggtacacatttgctctttaatatgattaccctgtttttctttggcagcatcatcgaaagtttttatcgccaatatttttatgacatgggttttgtgctgttctatttaggcggattaatttttgcgatcttgccaagctacctacaacataaaaatgatgcaaactgggcaagtctaggtgcttcaggagccgtatctgctgttctgtttgcgtatattttatttcagccgtggaagctgatttttgtatttttcatccctgtgccagctattatttttgcagttctctatgttgcttatagtatttgggcaggtaaacgtggtaatagtcatattaaccatagtgcacatttatggggggcagcttacggcgtaattgtaacgattttgattgagccaagagtgattcctcatttcttagatcaacttactcgcctacctttttaaatccatatttttgagaaaagcccaatatgggcttttctttttttctcatttatttatcaagataaattctcagatatttttctgattttctttgatcaattccttgttttgattgcaaaaaccatctgattaaactcaagcacaattcttttaataattcagatgatacaatgaagtacaaagctcttctatctagtctttccattgctttatttagcttatctttagctggatgtaacgataatgattcacaagaaactgcagtaagtacaccaaagcagccgaatattttattcattatggccgatgacttaggctattcagatttaggagcttttggtggcgaaattcataccccaaacattgatagtttagcgcaagaaggtcgaattttaactgactatcacactgcacctacatgctcgcctactcgttcacaactcatttctggtactgatcatcacttggcaggcataggtgctatggcagagcttacccctgatcatttaaaaggacagcctggctacgaaggctatttaaatgaacgctcactatcgattgctcaggtgctcaaagataatggttatcgaacttatattagcggtaaatggcatttgggattaacacctgaaaccaatgcacatgctaaaggttttgatcattcatttaccttattacaaggtttagaccaccactttaaacaagctccaagtgcgtttaagcgaaattcaacctataccgaagatggacaaattattcctatttcagcattgcctgatgactttttctcgaccaattattttaccgacaaattacttagctatttagagtcaggtaaaaatagtggcaaaccattttttgcctatgcagcctatacagcaccccactggcctatacaagcgccagcagaataccgtgaaaaatatcgtggcgtttatgacgttggttacgatgctatccgtaatgcccgtattgcacgccaaaagcaacttggaattattccagtaaattttgaggctgccgaaccaattgcgactcaaaatgctccacaaaaatatggcaagtggaatgagttaacagctgaacaaaaagcgcttgaagcacgcaaaatggaaatctacgcaggcatggtagaaaatctcgacgccaatgtaggccgaattattcaatatctcaaacaaaataatctttatgacaacactttaattttctttgtttctgataatggcgcagaaggttttgttcgcggaagctatggtagtgaatcaggctttgataattctgtagcaaatgtaggtacccctacttcttatcattacattggtccacgttgggccgaggtcagtgcagcacctttccatttatggaaagatacagctggtgaaggtgcaactaccgctcctgctattgtgaaattaccaaaccaaaagaaagctgaagaaaccaatcatagctttgcatcggtactcgacgtttttccaacattattagattatgctcatattccagtacctcaagggcaatataaaggccgaaccattaatacgccaagcggttattcttggaagtctgtacttgaaaataaatcacaaacgatacgccctgccaatttcagttttgctgatgaattgcatggtagtaaatatgcaaaacaaggcgaatggaaaattgcacttcaaggtcgccctgaattaggaacaggttcttgggagctctataacattgccactgatcgtggagaaaatcacaatgttgcgcagctataccctgcaaaagttcaagagctattagcggtttatcaaaaatacactgaacaaaatggcgtacaggaatataacgccaaatgaaattgaaattggttttaagtactacaatcggcctgttgttcatcacaggttgtagcaagtctgaacataacgctgacgctaaaacggttttaccaaagcatgccattcaatcggctgctttgggttccatcgaacagtgtaagagctatacaggacttcctacagactggcttaaaaatacaaccgcaggcatggtattcattccagatgggcattttaattttggttctgaaaaagcttatccagatgaacttaactttggaaaaaaacagcgggaagttaaaggtttctggattgatcaaactgaagtcactgttgctcagttcgcgagttttgtgaaggcaactggttatatcaccgatgctgaaaaacaaaaacaagctgctgttttttctccagacccccatcaccctcagcaatggtggcaacttaagacaggatatacatggaaaacaccaaacggcaaaaatggtgcacttcctaaccctcatgaacctgtacgctacgtaactaaaaatgatgctgaacattatgcagtttggctaggacgtgatttacccacagaacttgaatgggaatatgcagctaaagcaaactcaccaactgatactcctttacatcaagcacctaccgatgagcaccagcatccacaagcgaattactggcaaggtgcatttccctttgaaaatctgaaccaagatcattttactggtattgcgcctgtcggatgttttaaacctaacggttttaaactattcgatatgattggaaatgtttgggaatggacatcttctccttatcaaggtgcgcacgaccagcacatgggtaattattcggctttaaggcaacaagaaatgagcagtactcaatatgtgattaaaggtggatcgtttttatgtgctgaaaattactgttcacgttatcgtaatagtagccgctatccccaagattttgatttagccgccacccatgtgggttttagaacgattttacgctctccttaatttcttcttaatttagctgctaaaagatattttttaaccaaaaaccgatcgaaatataatcaaaacatttctatagtaaaagggagaatgataaaaaagcgagaacaacatgaaaacattacttctttgtgccgcagcaattttcacaatgtcattatcagcctgtgcagtacatacacctgagggtagtattgtgattgatcctgactctccatattacggacacccgggagatttttgcccacctggacaggcgaaaaaaggacgttgttagaagtactcttttaaagtcattagatagagacttctattaaacgatgaactgaatacctaaatggagggttccagcccaaaattagatgggatgaaactagaaaattatggtgtaaaaaatcaccatatccccaagatttttaaaagacaatcttacgttgtcttctatctagtttcaccccaattctttcttatttcgtttgacttttctgatcatttaataaaaaagtctagtttttactcatcgttgtatctttttattgatacattttgatcattttaccttcaggtcaaacctgatgaattcgctctatacaaaataactatttatgtaacgtaagtctataaaaatgttctaaaaatgtgaaaaaaaatgaaggtaaaatgcgatgtaattatcataaaaaatgactcatcttatattcatcacaaaaatattgaattttattttggcagttattgccacacgtttcttttcgttggcatagataatgtatacacctgtatattaaccttatcgtacaagcgagatattttatgtccagccagagtccagccgaaggtctacaatttccgattcacgcctcgataaaaaagcaaagcacgtctcttacaggccaagagattttgtcagaagctttatctattgtagataataaaactgctcaacagattttggctgaaaaaaattggcgaaaaaattatcctatttactttaaggcacttgttaagcacggaattactaacagcaataatccaattaccattgcaaaacagggattgcataaggctcatcatctttttgattattaccgcgatggtaaacactatcttttaaaagatgctctacacatccccacttctacacctttaaatacagtaaaatttaaaggcgaaagtgaagctgcaccagaatggtatgttccatataaaggtcaaaaactgagcgggcaaagcttacttgaccaaattcaaaaatgggaaaatgcaggtattattgaaccaagccatgctaaggctttacgcgaagctgctgctcatcctgaatggtttgatttatctgaccgtacgatggtgttatttggtgcagcctcagaagcaggaccattaccttggctagcaagatggaaagcgaatattgttgcaatagatttaccaaacccacgagtttgggggaaaattctaaatacaatccagcaaggaaacgcaacgcttattgcaccaagtattgaaaaaattgactcttcggcaaaagcttcagcattgagagataaattgggtgctaatttattaacgcaaataccagaaattgcccaatggttagttcaatttcctcaaaaattagacttggctgctattgcttatttagacggagaaaaacatgtccgtgtttctatggcaatggacagtattatgcaatatgtgagtgaacataaacctgataccagcttaatgtttatgtgcacaccaaccgatgtttatgcagtaccaaaagaagttgcagaagctgctcaagagaaatttaaatctcgttcacaactacaaaaaatggctgtgaaaggtgtttctacactctcactcaaacgtttttttcaagcaccttatcaagatttgattactagcgaaaatggcaaaacttatggtattgcagactgtttggtagttgaacaagggccaaactacgctttggcaaaacgtattcaacaatggcgtgcgacacttgcccgtcatcaaggtcaacgtgtaagtattaatattgcaccatctaccacaactcattcggtcacaaagaatccactccttaaagctgcttttaatggcgcagaactttttgatgtagaagcatttagtccagaaaccacgaatgccattatggcagcgttatggattcatgacttaagaaatgattcttctgttgcaaaccctgaaaccgtactcgaccaccctctagagttgatgatggaaggtgccaatcatggtggtctatggcgtgtggcttatttggcccgtacagctcttccttttgctgccatctatggctttgcagccgagaaacttccatttaggaaattttctaaaaaataataacgttgaaagcccaattttagaattgggcttttttgtgcaattaattgcgttggctatacgttaaatacttttgcatttcatcaggtggaaccattcctcctcctgtcgcccataccacatgtgtcgcatgctgtaacttttcagctgacaattgatgcaaagccaaataatcaggagtagtttgcacataatatggccccatcatgcccgccgccgccgagggttcaacttgaatattctcagtttgatttaaaagcgcaatgagttcatataaacattcatcatgaatggtgtagtaaccgtcaattaactgctgcatagcacgtccgacaaaaccagaagcacggccaacagctaatccatctgccgcagtgatgttatctaaaccaatgtcatttactgaaatctgatcatgcaggcctgtataaacgccaagtaacatacatggagagtgagtcggttctgcgaatatacaatgtacatgctcaccaaaagcgagttttaacccaaagctcaccccaccaggtccgccccctactccgcatggcaaatatacaaataaaggatgatctgcatcgactttaatttgcttttgttcaaactgttgttttaaacgcaaacctgcaactgcataacctaaaaataaagtagtcgaattctcatcatcaataaaaaaacaaaatgggtcctgttcggctgccttacgtccttcttctacagcaactccgtaatcactggcatattccaccacatttacaccaagtgaacgtagcttatctttcttccattgccttgcatcggcagacatatgtaccgacactctaaacccaagcttcgcgctcataataccgattgataaaccaaggttaccggtagaacctactgcaatttgatatttggaaaaaaatgttcgaaatgagtcttggtctaatttactgtaatcatcttctagcttgagaagccctgcctcaatggctaatttttcagcatgggccaatacttcataaataccgccacgtgccttgattgaacccgaaataggtaaatggctatcttttttcagccaaagtttccctgtaagtgtcttatgcttttgtagcgatagagcttgttgcatctccgcaatttctactagtgctgattcaatttttccatgctgggcttgagtttcaggaaagacttttgccaaataaggtgcgaaacgcgctagccttgcttctgcttcttttacatcctgttctgtaagacacactttcgctagtgcttcgtttaaaggataacggtgagggttaaaccaaaatgtttcttgataggcttgaagtgtttcaataagtggaaattgttgttttaactgatctatttgaaccgcattcataatatatcctgatataaaagtttaagcccaacctataaagctgttttgatggcctataacaacttattaatttatagatgaatgtacatgaaaaatagtctcaactttaaaaactaaacaaataaaaaagccactgtgaacagtggctttaattttttaaatgcttttatacaaactgtaagaataaccagtacaaaccacccgacaaacagatggttgcaggaagtgtaaatacccatgcagagagaattgtttttacagtattgaaattcaggcctgatttattggcaaccatagtacctgcaacagcgctgtttaaaacgtgtgttgttgaaaccggcatacctaaaccatctgctgcagcaattgtactcattgcaacaagctcagcagacatcccttgaccataagtcatgtgatgcttaccaatacgctcaccgacagttaccacaatacgtttccagccaaccatagtaccaagtccaagcgctaatgcgaccgccactttcacccagtttggaatgtattgtaagaatgaatccaagctactacgataatctttcacaagctttttctgtgagtcatccatttttggtaaagcatctgccttatccaaacgcttaaacgtcgttgtgctcaaatacatgtcattacggatttcgctaattgcagcttctggaatatcttttaagttgctatagctagaaacacgctcacccaaatggtcagtcatgcttgccaatgcaggcacaacttcaggcgtttgttgcttggtttgaatgtatttagttaaaaccgcacgcgctttttcgtcagtcaattctggttgattttggtttaacaaaaccgcagtttgagaagaaagctgatggaatgattgaacctgctgtgtatcgaggtttttatttaatgaataagctaatggcaccaaaccaaccaaaatcagcatgataagacccatacctttttggccatcattagaaccatgtgcaaaactcacacctgtacaggtaaagataagaattgcgcgaatgattgctggtggtggcttatttccttcaggtggctggaataattctaattggcgtttgaaaatagttttaaccaacaagaatacaattgccgcaaaagcaaaaccaattaaaggagaaaataataatgccttacctactttaatcacctgatccatatcaacaccactggtcgttacgccagtcgatgcactcaacagatgattcataatacccacacctaagattgaaccaatcaaggtatgagagctagaagcaggaattcccaagaaccaagtaccaagattccaaagaattgcagcgatcaacaatgcaaaaaccattgcaaagccagcaccactgcccatgttcataataagttcaactggaagcaatgcaataatgccatacgcaacagcaccacttgcgaccattaccccaaggaaattacaaaaacctgcccacatgactgcaaccggtgcaggcaaagcatttgtataaataaccgttgcaactgcattagcagtgtcatggaaaccgtttacaaattcaaagcctagtgcaatcaagagtgcagtagataaaagaataactgaataaaggcttaaaggtggaacatgcgctaaatcagcactgacctgaaacccaatataaataagtgttgcaataataatcgtcagaaacaccggcataaaaaacttaggtgtcgggacatgtacattcgtcgattttgcttgcaggtttgccgcaagttttgaatccgaaacagggggtagattagaattcatgcagacggtaagaggataataaaatcctctgtattcttaaattaaattatgacaattatatgacaaagaggcgcctgatgaagtcaattttttatattttgacctcatttgatgcacctttccccgactgtttttatttttttattaaaatacaataatttaaaccattaattatgagctccttttgtgcttatttttacagcaaaaaataaataaaattaccgatatgtctatttttcatacaaagcaactgtaatatttcggcatattgagcatgaaatatttcaatatcatgatcatttgatgaatatttcatgaaaattcttttgtttttgacataaagcgatctcttttttaactttttagtcagctacacctgaccttcgtagatcatcatttgtgctgctattctgttacaatagcgccgcatttttaaattcatataaagatcggggttttctatgtctacgcttgccaccctaaaagcgcttcttgctaaacgcattctgattattgatggtgcaatgggaaccatgatccagcgccataaattggaagaagctgactatcgtggtgagcgttttgctgattgggcacatgacttaaaaggtaacaatgaccttttggttctaacacagcctcaaatcattcaaggtattcatgaagcctacctcgatgctggtgcagacattattgaaaccaacagctttaacggtacacgtgtttcaatgtctgactatcacatggaagatcttgttccagagattaaccgtgaagcagcacgtttagctaaagcagcttgcgaaaagtattcaacgccagacaagcctcgttttgtggcaggtgtacttgggccaacatctcgtacatgttcaatctctccagatgtgaacaaccctgcttttcgtaacattagctttgatgaactaaaagaaaattatattgaagcgactcatgcactaattgaaggtggtgcagacattatcctgatcgaaactgtatttgatactttaaactgtaaagcagcgatttttgcagtcaaagaagtctttaaacaaattggtcgcgaattaccaattatgatttcagggaccattaccgatgcatcaggccgtactttaacaggtcagacagcggaagctttctggaactcggttcgtcatggcgatttgctttcaatcggttttaactgtgcccttggtgcagatgccatgcgccctcacgtaaaaactatttccgatgtcgcagatacctttgtttcagcgcacccaaatgcaggcttaccaaacgcatttggtgaatatgacgaaactccagagcaaactgcagctttcttaaaagagtttgctgaaagcggtttgattaacattactggtggttgctgtggtacgacaccagaccatattcgagctattgccaatgcggtaaaagacattgcgcctcgccaagtgcctgaaaccgtacctgcttgccgcttaagtggtttagaaccatttaatatttatgatgattcattgttcgtaaacgttggggagcgtactaacgttaccggttctaaaaaattcttacgtctcattcgtgaagaaaactttgcagaagctttagaagttgcacagcagcaggttgaagctggcgcacagattatcgacattaacatggatgaagggatgctcgattcgcaaaatgcgatggtgcatttcttaaaccttgtagcatccgaaccggacatttcacgtgtaccgatcatgattgactcatcgaaatgggaaatcattgaagccggcttaaaatgcgtacaaggtaaaccggttgttaactcaatttccttaaaagaaggttatgacgagtttgttgaaaaggcccgcctctgccgtcaatatggtgctgcaattattgtgatggcctttgacgaagtaggtcaggccgacactgctgaacgtaaacgtgaaatctgtaagcgctcttatgacattttggttaacgaagtaggcttccctgctgaagatattatttttgacccgaacgtgtttgcagttgcgactggtattgaagaacataacaactacgcagtcgattttattgaagcaacgggctggattaaacagaacttaccgcacgccatgatttctggtggtgtgtctaacgtttcgttctcattccgtggcaatgaaccagttcgtgaggccattcactctgtattcttgtaccatgccatcaagcaaggcatgaccatgggtattgtgaacgcaggtcaaatggctatttatgatgatattcctaccgagctaaaagaagcggttgaagatgtcattttaaaccaaaatcaaggtgagtctggtcaagtcgcgactgagaaactacttgaagttgcagaaaaataccgtggacaaggtggtgcaacaaaagaagccgagaaccttgaatggcgtaatgagtcagttgaaaaacgtcttgaatatgccttggttaaaggtattacgacttatattgaccaagacaccgaagaagcccgcttaaaatcaaaacgtcctttagatgtaattgaagggccactgatggacggcatgaacgtcgtcggtgacttgttcggttcaggcaaaatgttcttgccacaagttgtaaaatctgcccgagtcatgaaacaagcagtagcatggctcaacccgtacatcgaagctgaaaagaccgaaggacagtctaaaggtaaagtcctaatggcaacggttaaaggtgacgtacacgatattggtaaaaatattgtaggcgtagtacttggctgtaatggctatgacattgttgaccttggcgtaatggtcccttgcgagaaaatcttacaaactgcaattgatgaaaaatgtgacatcattggactgtctggtctgatcaccccatctttagatgaaatggtatttgttgctaaagaaatgcagcgtaaaggctttaacattcctttattaattggtggcgcgactacttctaaagcacatacagcagtaaaaattgaccctcagtatcaaaacgatgcggtaatttatgttgccgatgcttcacgtgctgttggtgtagcgacaaccttgctttcgaaagaaatgcgtggagcatttattgaagagcatcgtgctgaatatgccaaaattcgtgagcgtttagccaacaaacaaccaaaagcagccaaactgacttataaagagtcggttgaaaatggttttaaaattgatgaaagctacgtgccaccaaaaccaaatcttttgggaacacaagttttaaagaattatccgcttgctacactcgtggattattttgactggacgccattctttatttcttggagtttaactggcaaattcccgaaaattttagaagatgaagtggtcggcgaagcagcaactgacctttacaaccaggcacaagcgatgttgaaagatattatcgacaacaatcgttttgatgctcgtgctgtatttggtatgttccctgctcagcgtacagatgcagataccgtcagcgtatttgatgaagctggtcaaaatgttacgcatacttttgagcacttacgccagcaatctgacaaggtgacaggcaaaccaaatttatccttggcagattacattcgagctgatcgcgagcagcaagactacttgggcggattcactgtatcgatttttggtgcagaagaactggcaaatgaatacaaagccaaaggtgatgactactctgcaattttagtgcagtcattagctgaccgttttgccgaagcttttgccgaacacttacatgaacgtattcgtaaagagttctggggctataaagctgatgagcagctcagcaatgaagaactgattaaagagaaatatgtcggtattcgccctgcaccaggctaccctgcttgcccagagcactctgaaaaagcagtgttgttcgactggttaggttctaccgacaaaatcggcaccaaactgactgagcactttgcaatgatgccgccatcttcagtaagtggtttctattattctcatcctcagagtgaatactttaacgtgggtaaaatctctcaagaccaacttgaagattatgcaaaacgtaaaggttggacactggatgaagcgaagcgttggttagctccgaatttagatgactcgattgtttaagttcttaaataaccctgtttaaaaatagggcgtgaaggaattccccatcacgcccttttcaatttgaaagtttaatctttctacttcaaatgtgccttaatcttctctttaactgcttcagttgaaataccatatcgatcatgcaaagtgggtaatgcgcctgcatctaaaaatgcatctggcaaaccaatcatatcaaaacgaggatgttgaccatttcttaaaagtagtgagccgacagcttctcctaacccaccaatgactgaatgattttcggcagttaaaacaggtcggccaccttttgcgacttcatccaaaatagtttgttcatctaaaggcttaatggtaggcacatgcagcactgaaacctcaatgccctctttttcaagttcttcagctgcctcaagcgcacgcatggtcaataaaccagtcgaaataatgagtaaatctttacccggtttaatcacctgtgccttacccaatttaaactggtaattatatttatcgagcactaacggaacttgtccacgcaataaacgcatatatacggggccattatgcgcggcaatctgaggaatcgcctgttcgatttctaaggcgtcacatggatcgataaccatcaagttcggcatagcacggaaaattgcaatatcatctgttgcctgatgacttgggccataacccgtggttaaccccggaagtgccgccacaattttgacgttcaggttatcctctgcaattgccatacaaataaagtcataggcacggcgtgatgcaaacacggcataggtcgtcgcaaaaggaacaaatccttcacgagcaagtcctgctgctgcgctcatcaaaagttgttctgccatgcccatttggaaaaacttgtctgggttttcttttgcaaaaatatgtaggtctgtatattttgacaaatcggctgataaacctacgatatcgtcacgatcttttgtcaaggaattgagtgcatgtccaaatggagctggtttggtcggttggccctccgcagcaatagaagcaatcattgccgaagtggttagttttttcttaggaggattagctaactggctcatggtatactccttactgtccgtagtgggtcaaaatatttaaagcgtcgtcccattcatgttcatcaacacgaatgaaatgtgttttttcgcggctttccaagaacgacacgcctttacccattttggtgtcacaaataatgactcttgggcatgctccctcatagtttcgtgcctgatcgaatgcctcaagcagagcttccatgttgttgccatctacacgctgggtgtaccaaccaaatgactgccaacgatcaacaattggctcaaatgctaaaatttcgctggagtgcccatctgcctgctgattattcacatcaataatggcaatcaagttatctagtttccaatgcgaagcagacatcactgcctcccatgttgagccttcatttaactctccatcagaaagtaagttatagacaaaagcatctgattttttctgtttcagccctagacatgcaccgactgcaattccaagaccatgacccaatgagccacctgtaatttccatacccggtgtgtaagaagccatacccgacatcggtagacgactgtcatctgcaccgtaggtttcaagttcttcaagcgggataatttttgcttcgattaaggctgcatagagtgcaattgcatagtgtccaatagaaagataaaaacggtcacggccttcccattcagggttttcaggctgatatttcatggcatggaaataagatactgccagtagatctgctgcacctaaagcttgtccaacatagccttggccttgtacttgccccatgcgtaaagcatgttggcgaatgtggtaggcacgttgttgcaactcggcaatttggcctactttatcaacatttaacattgtcttttactattccttattaacgattgaccagttttgccggaacacgcagaaccagactggcaccgaaaattaatactgctgtgattaagaacatgccgattgcatttgaacccgtgttagtagtgacccaaccgattaaataaggtgagcaaaatccggcaaggttggcaaagctattgacggctgcaatacctgccgcagcggaaacaccacccaaaaagttggtcggtaacatccagaacaaagaggatgctgtcagcacacctgaggctgcgatgcaaaggcaaattaaagagagcgttagatttgaagcgaataaagtcgcaaatgtgagtgctatagcacctgcacacatcggaataattaagtgccagcggcgttcttggaaatggtcgccgctacgccccgccaaaatcatgaccacaatggcacacatataaggcaggcttgtgagcaaaccaatatgccagttatcactaatgcccgagttacgaatgagagttggcaaccaaaatgtaattgcgtattggcccatcactacacaaaagtagatacctgcgagtagccataaacgtttatctgcgatgaactctttgacgctagcatgaccttctttgtgctggttatcctgagcaagctcttgcttcaccaagttcttttcgtcttgggttaaccagttggcgtcttgaactgaatcttttaaaacagctagtacaagtaagccgacaatcactgtgggaatagcttcgatcacaaacatccactgccagccaaaccaaccatgtacaccgctcattcggtccatgattaagcctgaaagtgggccaccaatcattcccgaaattggaattgcgataaaccaaagtacggtcatgcgtgcacggcggtaagacgggaaccagtaagtgaggtagagcaacaaacccggagctagtccagcttcagcgacacccagtaaaaaacgtaaggtgtaaaattgccattcggtttgaacaaaggcaaaacagcctgacaaaatgccccatgtaatcatgatacgggcaatccaacgtcttgcgcctaccttgtgaagtacaatgttacttggtacttcacaaagaaaataaccaataaagaaaatccctgcgcctagcccatatacagcttcactaaactgtaaatcgctcatcatttggagcttggcaaaacccacatttacccgatctaaataggcacaaaaataacaaagcattaaaaatggcatgagccgaaatgcaatttttcgatacgccgatttacgaaccgttgtatctacttcagatgaaaatactgtatccatcatgcgaatccctttacatttggccacagtatcctcttgtgaccatcattctatttttatttaaatggtgagcgtttaatgaataagcatgccaccatttacatcgagtgttacaccagtcaaataagctgacaggtcacttgccaaaaatagtgctgcatttgcaacgtcttgtgctttacctaaacggcccagcggaataccagccagaatgtcgtgacgacggtcatcattcattaaaccgccagtaatatcagtctgaattagaccgggagtaagagaatttacacgaatctggtcaccaccaaactcacgagccatcgcttttgccagacctaacacgcctgctttagcagcgctatagtgtggcccgccaaaaataccaccgccgcgttgtgctgaaactgaagataggcacacaatgcttccaccaccgtttgctttcatagatggaataacagcttgtgacataatcagtgttccgcgcaggctgacatctaaaatacggtcatagtcattgcgctgaatatcgagggttttaactggctgagtaatgcccgcattgttaattaaaatatcaatcttgccatagtgctgtagtgcttgttcaacagctgctttgacctgttcttcatttgcaacatttgcagcaagtcctaaatgaccgtcaccaagcgcctttgcagcgttttggctttgagcaagatctaaatcaacaataatgactttggcaccctgttgtgcaaagatttctgcggttgctcgcccaattccacgttctgatgctgcaccagtaattaatgccacttttccttgtagtaacatgttgaatcctcttttacgctttatttcctgagttctgacttagaatcccttttttcacaaagcccagcaatcatgtcgaattcaactaggcatgaaaaaaattcatgtctatgctattttcaaataagttttagggataaaaacggattatttcatggacagtagtgaaaacaatttcaatcagatgccctctattaaaacattacaggcttttgagcaaactgcccgttttggcaatgttgctaaggcagccgagcatttgaatctcaccccttcggcagtgagtcaccaaattgctaagcttgaagaaatgattgggcagagtttatttattcgtggtgcccgtggtgtgacacttactccttcaggtgagcgctattttcaagatgtcaccaccattttgcataacctaatgttagccacggaaaaagctgccgataaaagccctaaagacagtttatatattcattcatccccaagttttggtttactttggttgctccctcgccttgaatcatttaaagaaaagttccccatgattcaggttaatttgtcgtgttcgtatgaaaatttgcactttacccgcgataagatcgacattgatattcggcatggtttacccaactggacaggggtagaaatcagaaccattcgtaatgaaaaacttgaagtgcttgcgtcccctaagctactggaacgtagtcctgtgcataaacctcaagatttattaaagaaagatctgattttatcgcgctcaaccttagtgacttggccccaatggtttgcccatcagggtttaagcattcctgaatttccctacactttgagttttgaccgctcttatatgtcacttgaggcagccacacacgggctaggttttgttttagaaagtaatttactcactcaaaattacttagaatctggaaagttggttagagtttttgcagatgagctatcgattccaatctctgctcatcacttggtatatccacgaacccaccaatttattcctaaaattgagctatttttaaactggattcatgatgaattgtcaggctgagaaatcatttcttaaatgatctgaatttgctcaactcgtaagtgatgcatcatctctcggataaatacaaagtaggtaaaaatataaagctgatttggatccacttggtttgtgtagtaactcaaacgctcaataaaactattaaatccattctcaagctcgatacggctgatttgctttttagcactaaaaaataactcactgagttgtgtcatggtggtatcagccgtaacggctataccatttatattgagatttctgagtggctgcgactcgatgatttcttcaataaaataaatcatcttttcaatcgcaagctcatcaataacaccattgctgatactttttgaattaataaaaactaggccctgctcaaggtgaatgggctggttatctaagtcaaatgacatgccattaagaccaagtgaaaactttaaaaccgagttgggatgattcataaaaatagcttactgctgaagtttgctaataaagttaatttgtttataaccctaaatggtatcgactgttcaatactcagcattaactgatcgattattattaacactatatataataaaaacctctttaaaaagatgaaaaatcaatcttatattcatccagtcttactattacaaaatagagtataagcatgaaaaaattagcaattttaggtgttacggtttatagctttgcacaactggcaaatgcagcaacgttaaatgtaaaaccatatggtacgactcaagacggccaaaaagttgatctatacaccatgagtaataacaatggagtctcggtatcttttattagttttggtggtgtaattacacaaatcttgactcccgatgcccaaggcaaacaaaataatattgttttgggctttgatgacctaaaaggctatgaagtcactgataccaaggaaggcattcattttggtggattaattggtcgttatgcgaaccggattggtaatgctaaatttagcttagatgggaaaacgtataatcttgaaaaaaataatggcccgaactcattacatagcggcaatcctggttttgataaacgtgtttggcaagttaaacccctcatttctaaaggtgaaactgttaaagcttctctgaagttaaccagtccaaatggagatcaaggttttcctggaaaattagatgtagaagtgatttacagtctttcagatcaaaatgaattcaagattgaatataaagccaaaactgatcagcctacagtcgtcaaccttaccaaccacagttatttcaacttatcaggcgctgggaacaatccttatggcgtgctagatcatgtggtacaactcaatgcagaccgtatattggtaactgatcaaaactctttaccaacaggtgaaattgcttcagttgcaggtacaccttttgattttcgaacgcctaaagcaatcgtaaaagatattcgagcaaataatcagcaattggcctatggatatggctatgaccaaacttgggtaattaatcaaaagtctcaagggaaactcaatcttgcagctattgtggttgacccaaaatctaaacggaccatgcaagtcttaaccactgaaccaagtgtccaaatgtatacagccaatcatttattaggaaatattgttggcgcaaatggcgtactctatcgacaagcagacgcactagcattagaaacacagcattttccagacagcccgaatcaaccggctttcccgtctacacgtttaaacccaaatcaaacttataacagtgttaccgtatttaagtttggtgttcaaaaatagtctttctaatgaggctatgttcatattaaaaagactctcagctgaatatggctgagagtcttttcatttatttaacttttgtgtttggtaaaagtgctgttgcaaaaccaagtaatggcaacaatgaacataaaccaaatacccattcaatgccgttaatatccgctaaatgccctagccccgctgcggcaataccacttaccccaaacataaggccaaacattaaacctgcaatcatgcctacacggcccggaacagcttcttgtgcataaaccaccatcgctgcaaaagcagatgacaacaccaaacctgcaataattgagaaaactgttgtccaaaataggtttgcatacggcatcattaatgcaaacggtgccataccaataaatgaaacccagatcacagctttacggccaattttgtcaccaattggaccacctgcaaatgtacctacagccacagctgccaaaaaggcaaataagtgtaattgagctgtttgaatactaatatggaacttttgaattaaataaaaagtaaagtagttactaatgctggcaatataagtaaatttagcaaacatcaacacactaattgtgctcaaagcaataatgagcttacggccatgcaatttagtatgtacttgagttgcacgtgcagctacctgacttttagcatggtttactgtccaacggcttaccccaaataaaacccaaatcgctaaaagtgcaaatatcaccaagcccgcaactgcatgctgcccaaacgggacaatcagtaacgctgctaataatggaccaatggcagtacctgtgtttccgcccacctgaaaagtcgactgagctgtaccgaagcgcccacccgatgccatacgcgccacacgcgaagcttctggatgaaaggtggcagaccctaccccaatcagtgcagatgcacataacaacacagcaaaacttggtgaaaatgccaacaagataatgccgcagaatgtgacgaccattcccagtgggagaagatacggttttggatgtttatcggtataaagtccaatccaaggctgtagcagcgaacctgtaatttgatatacaaacgaaatcaggccaacctccgcaaaactcagcgaaaagtttgcttttagcattggatagatggctggtagcactgcctgaattaaatcgttcagtaaatgtgcaaccgccacggcgcctacaattttaataatcattccttgagactgatcatttgcaacggtattggcaataccatctttcaattgtattgaagacgtcatacctgaaaaactccaatatttttaaatgagatgcttattgtaaattgtcgcttataaagttatcttccaataatcattgtataagtgacaatttttaggatagtttatgtccgattctcttattcagtccgatttgtctgaattggtaattggactctcttccgagcattcttaccgagaaatcacgcctactcatacacatacgcgtgctcagtttttatatgcatctaccggaaacattcaagtttttacacctaatcatgtatggattgtgccgcccatgtgcgcgttatggattccggcaaatgtagagcacagtgtgatttcactgagtcacgttaagttaaatacggcactggttgaagtaaatgcagccgctcgaatgggacaacattgctttattattcgggtgagtaacctgctgcatgaacttttaatacgtttaaatgaaattgaacgagaggaaacgccaaatacagcaacctctcaagagctttcccgttctttacaaattttgatctttgaagaaatacagcgagccaatttattgcctatccagataccgtggccgaaagacaaaagactcttaaaaatttgccaagagttattacatacgcctaaccattcaagagatttaacagattgggctgatgatattggcgcgagttctagaactttaatgcgtatgttccagaaagaaacggggctatcttatcgggcatgggtacagcaaatgcatattgcacttgccttgagtaaaattgcgaatggcgaatctattgctcaaatttcagagtcactggggtataccaaccccagcgcgttcagtgcgatgtttaagcgacatctaggtaaaacacctcagcagtttagaagtgctgcgatgtcgctataagtctttttttttgcagggatctcatgcttttcaagcaaatcatcgaaatcatgataaacatgaagttctcgatctttagctgttcttgcatgatctaatcgttgttcaggatcgactaaaacaagagtatggccatcatcaatcagacgatctacaccttctaagaacatacgtttacccacatcgtggataagtgaaatctgggttaaatcaatcacgattgtgctttggtccgttgtctcgtcttgtaaaatacgcaacaacatttcagcttcggtaaatttcaatacgcctcgaagcacatacacacttaacgatgcatctttcccagtacggtaatgactttgtacaatcgtttgtgcagaaggcgtaccttccatgagatgtaatcccatgtcacgagataatcgctctaaaatatcaattcctcgaacactatgaccgtgctcatctagtcgaggtgaaaaagcagcaatactaacttgacccggcaacacccccaaaataccgcctgctacaccacttttagcaggaataccgacagttgaaagccagtcacccgcggcatcatacataccacagctcatcatgacactgagtacttgtctaactacagatcggttcagtaatcgttttccagttttagggtcgaccccgccattggcaagtacactgcccatgcgtactaaatctttaactgtaaccatgatcgcacattgacgaatgtaaccattcacaatatcgacagggtcagtttccaaaatccccaccgtgcgcaacatataaccgatcgaaagattacggtaggctgttttgacttccgaatcataaacagactcatcaaaacttaattcgcgaccagcaagctcgctcataaaacgtcgtagaatttctgcactatgcaaaccatgtttgacctgaatcaaggaatgtacagtaattgcaccagagttaatcatcggattttttggacgaccatctttacccaatgaaatttcattgaaggcttcccccgaaggctctacccctactttcgcaagaactgcatcaataccaagttgttgtaaaacataagcatacacaaaaggtttagaaatcgattgtatggtgaattcaacatcatcatcgccgaccgaataaatttcaccatctaccgtagacattgctaaagctaatcgatttgggtttgcatttgccaactcaggaatataatcggcgagatgaccgctgttatcgatgtcacaggcttctataacatttgccaaataatctgggagaggggttttcatggtcagtaaccttaaatgaggagatttacaacatcgcgcaaaatttcagcacaacctgctgataatattaaaattatatcttttgtaatgagttaaaaatcacgatataaatattttaattctgttctcttatttatttcaagctcattatagttttttcaaaactttaaactgaagattagcttattctttctacaaacaagattccatttaaatgatcgacctcgtgttgaacaatacgagcaggaaaaccgtgaaaaattgtttcaactgcttcaccctgaagtgttaagtatttcaccttaaccatttctgcacgttcaacttgtccacgctcatccggtacacttaagcagccttcttcgcccaaacacgtttcactcgaaaattctaaaatttctggatttaccatgaccacagcattcatttcaggcgcatccggatagcgtggatttggtcgagaagccacaataataatgcgtttagagatataaacttgcggtgcagcaatccccactccattgcgctcaagcatagttgcatgcatagcatcagcaagctgataaagccaattactgtttaactcatttgccgaaacaggagccgcaattagttttaaaatatcttcaccacgctttgcgacaggtaaaaccacactcatcctttgaatctcttattaaactggctatgactagttttattgtgtcgctgaacggcccaaaagaaaagtcattcctacatctgtttttgttttatctaaagtgttttttgttttaaagctttttgatctgagtaaatccattcggcgttgccctatagaacaaatttcctccatttacttttatttcacttttccattaatatccaaacttcaattacaacaattaagtaaaaaatggatcaggaattaactttgcaggacgcgaactatcttaataaagaagataaacgaactcttgccctttcttcattgggtggagctttagagttttacgattttgtgatttacgtgttttacgccaaaatcatttccgacctctttttccccagcacacttagtccgttttgggccatgctcaacacttacggcatttttgcagcaggttatttttttaggcctttgggtggggttgtcatggcccattttggtgatttggtcgggcgtaaaaaactattttcgctttctattttactgatggcgctgcctaccctatttatcgggattttgccaacttttgaaaatatcggatatttggcaccgctacttttattactcatgcgtgtggtgcaagggattgcgattgggggtgaaattccagccgcatggacatttgtttctgagcacgtgcctgaaagaaaaatcggactagcaaatggtttattaactgccggactgtctttaggaattttactaggcgcgctcatgtctttatggatttcacttaattttagtgaaggacaaatccatgactgggcgtggcgtattcctttcattgtgggtggtatttttggactcgttgcactttatttaagaacgtatttgaaagaaacccctgtgtttaaagccatgcaggcccgtaaagaaatttctaaagaaatgcctgtaaaacaagtcttaaaaacgcataaaacagccgttgcaattggcatgttatttacatggtttttaacgggatgtgtggtggtggtgattttagccatgccaaatttgttgattggttcatttggctttgagcgcgcacagacttttgaaatgcaaagtgcagccattgtcatgcaaatggtgggctgtattttagcaggctattttgctgaccgttttggctgtggcaaagtcatgatggtcggtgcgcttgccgtggcacttacagcggcagttttttataacagtttaggtcatgcggcacattcaaccatttttggtttatatatgttgttaggtctatgctcaggtactgtcggcatggtgtcgagcagtatggttaaaatgttccccgcgcctgttcgcttctcgggcatttcattttcttataatttatcgtatgcaattgttggtggtatgacgctacctttagttcattggctcagccaatatagtgatattggtgcgatgtattatattttcgcgctaaccattttggcctttgtaactgcctttgtgttttggaataagtttgaaaaaaacaggtattaaaaattttcacttattaaataaaaaaccacgccgattgcgtggtttttttaatactgcttattttagaaagtaaacccaatattaaagttaatacggtataaccatttatcactatttggtgaagttgcagaggtataacccgttgagttggttgccccaccaataatgttagagtttttaccccacgtataatctgcccaaaccataaatggtgaagcaataaacatcatccctgtggtattcatttgcgagtctgaccaatcatcacgttttttatcaagataactataatcattataaaacttaatggcttttagcttgcccatattggtcacaggcaacgtataggcaaggtttaaactggcaatggttccttccgaagcaatgaaataagcaggtgtaaaaccattattgcccattaaggtcatgtcactatttacaccatccggatttttagcatcgtactgatagtgaatgaccgaactttgtaagttaaagcgtttgtagttgttttcggtatgcaaaccgactgcataatatttaccgtctttatcagtcactttgttatgtagctgagcgattgcacccgagacaccaaactcttgcttaccgaaatcagtttctaacttgcgcacaatgcgggtattaaactgatgacgtttttcattctgataagctttttgagatggaaatgcattttcttgcaagtcatcataagttgcactttcaggtgaataacgcaagttggtttctaacatttgcgggtaataaccgagttttacatcccaatctttgtcgtgataattccagttaagccccggtgcaatgttattgccatatcctaaaaagaatggaatatgataggtccagccattttgcggatagggataaatcgtaaatggtttataaaccaggcccgcttcaatgctgttattggcatctaggttatagcccacgtacgctttttcaatggacgttttctgttggtcttgaaatagatagctggcgttgatataggcatcatcaaacttacctttgagatctaccctgaaaatatcaaaatagagcttaccgaaaccacggtttggcccttcccaatcttcataacgttgatttaaccgaaccaccccacctaactttaatgaatccgtaccatcatcacttttccattcaagcaatgagtcttttgcaaatgcattgacgcttacccccagcgtaagcggtgcaatgaatgccatgatcaatgaagtctttttcatctctacatccttgattgagttccagcgtcctgctggaactttatttgttttacctgtaaaacttcgtttttattgttttttagacaaaaaaatttatctaaaaaaaggatggcttagcagctcccatcgcatatgtactaaaccatccaaactggttaatacagtttcttttgcggtggacccgcgaagtttaatggtccaatcgagttcatatcgagctcaatcacggttggtccttcaaaagcgacagcctcttgaataaccgttttaaactcttctgcactaccgactttccagcttttcacacccattgattcgccaagaagtttgtagtcgggtgtatgtaattcattgaaatactgacgaccaccgaagtagttattttgaatgccacgcattacgccataaccaccgtcattcataatcattaggaccatattggtgttttcttgcaccatagttgcaatttcaccaatacccagcattaagccgccatcaccgactaaaccaattacttttttgtcagggttagcaatcgaagcaccgattgctgttgcaaggcctaaaccaattgcacccgcaagtgagtggatgttttggtttggcgcttgtaccgggaataaacgactgccccatgtactacccgacatggtgatgtcacgtacaaaaatgccgtcttgaggtaaagctgcacgtaagtgatcacaaattaaagcgtattggtcgatttgtttacgcagtgcatcaatcgcagcttgtttagcagctactacagcagcatcgtaatcggcatcaacttttgaagttccttgaagctgttctaacacacgtgttaagacatctttagcatcgccacaaatgaagttgcggattttgtaattacgttgctgagccacagggtttgcatctacctgaataatgttttcaggaaattcaaccgaataagtttttgtttcattactacgtaaacgagaacccactaccaccatcaggtcagcatcttttaataattgctcaacacctgccgagttatggaaagcacctaagctacgtggatggtcatctggcaacaccccacgagcatgagtcgatgaaacaaccggaatacctaaatctgcaattgctttcacttcagcaacactgtttaaagttccaccaccaatccagaaaatcgggcgttttgcttttttgatttcactgacaagaagatcaatttcagcttgctctgcctgtggcaactcaagtgctttcactggcccaagattaagtggcaaatcaatctctgctgcttgtacatcaatgggtaactcaacacttactggccccattggaactgtagttgcgacacgaatagcctcacgaatcacaccaacagcattgtctgggctggtaatacggaacgccgctttgcttgatgcacgtaagaatgtaagttggtctttggtttcatgaatgaagcttgcatcacggtcaaggtactcacgctcaacttgccccgttaaatgcaatacagggctacccgcattcattgcttcaatcagtgaacccactgcattaccagcgccagcacctgtactggtcaacgctacacctaagcctttaaagcgtgagtgtgcatctgccatagtaaccgcacccgcttcaccacgtgctgcaacaaagcgcattttttcacggcgccctaccgcatcggcaataggtaaattgtggatggaaataacaccataaatactatcaacttggtgcgcttctaaaactcttgcgattgcttcgcctacatttacacgttcagtcatgtctgttcctcaaaatttgttttcagtccttgaatttattaatcgcaccaagggttaggctgttcattcagccccatataaatactcttttgttgcatgtacgataaaatgcccaaacggcctttttcgcgcccaatcccactgtctttaaagccaccaaacggcgcactaatcgagaattttttgtaggtattaatccataccgttcccacttctaaggcacgtgcaatacgccaagctttacgatagctttcagtccaaatacctgcggcaagaccaaaacaactgtcattggcttgggcaattaaatcttgctcgttgtcatatttcataaccactaaaacagggccaaaaatttcttcctgacaagtttgagcactgttatttaagcccgtaataatcgttggtaagtaatagcttcctttggcatagtcaccagtcgtaagtgcctcaccaccaatcagaacctgaccaccttcgcttttagcaagttgcacatagcgatcaactgactgcaaatgtttgtcattgaccagtggtcctaaatgcacgcctgcctgttccggatggcccacacgtaaacctttggtaatttcaaccaaacgcgttaaaaactgatcgtaaagactgctatgaataaacaagcgagaacctgcaatacacgcttggcctgccgagctaaaaataccgtaagccacacctttagcagccagttcgacatctgcatccggtaaaacgatggttggtgacttaccacctaactcaagcgaagtggtaatcagtttatctgcagcaatatgtgccaaatgacgacccgtggttgttccacctgtaaaagaaattttacgaaccaatgggtgctgagcaattgcgtcaccaatgatagaaccacgccccactaacacactaagtaagccttttggtaaaccagcctcttcaaaaattttggcaagctctaaagcaatgagtgaagttgcttctgctggttttaacactacagcatttcctgctgccaaagctggagcaagcttttgaacttcactcgcaattggagagttccaaggagtaatagctgccacaacccctacaggttcatgcacactcatggtcataaagtctggagcacgttgagtggtgagctcatcgttcagtgtttcacatgcagctgcaacataacgtgcagttgccgcagcactcatcaccaagccacgagtttcggttaaaggcttaccattatcgcgggtttgtagttttgataattcatctacacgcgcttcaataatgtctgcaactttgtagagaatacgtgcgcgctcatgcggcaagctgtttctccagctcggttgacgccaagcctgttctgctttttcaattgcttcatttacatcttcaagcgttgctgttgaaagctcagcgtttaccgactgatctgccggaaacaggctttgaatgactgcaccacggcctaatcgccattcacccgcaatataaatttcctttgccatgatcaaatccttcttaaatctgtattgcttctacactgttgcgacaagcacgaatcacgctaagcgcagccaaagttgatgttttcgggttacttggcagcggcacacccaccagttcaatggtcatttgtccaaagccaccttccgccacaatggtgtgtttgttcttgttgatagttggatcaacagttaactcaaccatggtttcatccattccaagccctgcaagtgcaatcgttgctgcaacgttggcattggccggaaatttcatagcagcttcacgagcagttccagtaaaaaagaccgtaggttctgaaacatggtctaaatcgaccaattgctctgcataactgcccttccagctctttggacttttacagcctttataagtgaccttttgcaagccaccttctttagcagcagaaataccgtcaatacctgcgatagcccctgccagtaaatgcagatgggcatcatttttttcggcagtttgcttaagctgaaccaaaaattcactatcagccaaagtacccaccgaaatcagaccaatggtccagcctttcgctaaaactttttgagcatgctcttttactgctgcttgacctgccacctcaatgacatagtctggtgtaccatcacattgctcaatatctgaaatcacttgaatgtcagaagagacttgtgattgcactttttcaatgctgcgagatggcactacaatccacttgagttgcagatcttgaggcaagtgggcatacacttctgctgccattgcaccaaaaccaatcatcatcaactttttcatgacagcacctgatatttataaatgtttgttaaaaccacccgagacatctattgccgaacctgtggtgtaagatgccaatggtgatgccaagaaaactaaagcacgtgcaggctcttctggacggcctaaacgctgcataggaatgccacgattttttgcgatattgccggtccactcttcccatgacagatttaaatctgaacgggtttcataacggcgtttccactgcgcagattcgaccattccgagtaaaatcgaattcacacgaacgccatattgagtaaattcatgtgccaacgaatgggttaaattcaacagtgcagcacgtgcagatgaagtcgcaatcatgtgcggttccggttgcaatgccagtaacgagttcacattggtaattgaggcatttgccgactgttttaagtcgtcaagaaaagcccgtaccggatgtaaaacactgaaatatttcagctcaatctctttcatccagtcttcatcttgcgtattttcaaaatttgaaacacggccttgtccagcattgttaataagcatgtccacattgcccaaattgagtttgacctctttggcaaattgctgaacttcttcttttttcaaaacattacatgctttggtaaaaatattggcatgtggaaatttttctaaaatatagtgcttagaagcatttaaacgttcttcatcgcgaccacaccaagcaacttttgcaccctctgcaaccagtatttcaacagcagccagcccaatcccagatgagccaccggtaacaactgcaacttttccttcaacttggaagctcataatccttaatctctcttacgattgttcctgaatcgtcaacataatttggttaaatgcttgcggttggtcgacataacttaaatgtcctgcatcttctatgacgaagcgctgttccaactgcaattcctgagcaagctcttgtatacctaacgcaggagtgatttgatcttgctgccctgcaatcactgtgcatgggacttttaaatcggttaaataattacgtatttcgtcatatgccagtaagtacgatgcatgtgtgaaaccttgtaaggtcaactgctgcatcacttctgaaactaaagctaaggcttgtggctcttgtttataaatcaaatgaggtccacggctttgggccattcctttagcaccgagttctttcaacatttttggtcttttttcaaaaacctgaatttgtgtctgttcatcgtggcgttggtagccttgcgccaagttagcgaccaccaagtgtttcactcgctccggacaaagtgcagcaaatgcactgccctgtaaggcacctaatgagtgtcccactacaattgctttttcaatttttaaagcatcgaacaaccctgccaaacgctttgcgtagtcggtcgcattcggttgatccgttaaaagttcatctgatttgccatagcccggtgcgtcccaggcaatgacatgaaaatgatgagacagcacttcaagttggtttacccatgaagcagaaccggaactgatgccatgcaacagcacaaggtattcgccctgaccagcttcccgataggcttgctgctggccttgaacattgaccgttttcaccggaaattctgctaacttttcaatgagtgtcatcatttttaattctttccttcattcacttcatcaaacaattaacgtttgatttgagacaatggatgctctggtggatagttaggaattgttggtttacctgttcccaacatcacacacatcaaggcgtcttcttgacctgggttaaacaaaccacggtaaattcccggtggaattgaaatcaggtcacgctcttttaagcgggtctggaatttctcgccgttgtgctcaataaacaaatcaatttcgccgcggagcataaagaaaacttcttcaacgtcgtggtgaatgtgcaaaggaccttcacactgtggtggtaacaccatagtcgaaaacgtaaagttctctgcaggtacagtattgctgtcatttgcaacaccagttgcacccgtacccatatagcgcatttgagcacggcgatatttcgggtcgtaatcggcttggaacttcaaagcctcaaagtcatatttacgagtctcaaagcgagcaatacgtgtgtttaaccaatcttctaaagaagcgccttccggctgtttccacgattcgaattgttgtgtagtcattttttaaactcctatacagtgaattaataacgttttaaaagaggaaccaagaacaacgacccaatgacagcgactgcagccaagaaggtaattcccaaattaaaactatgtgtttgcatcacgatgtaaccgatcagtacaggtgcaattgcacttgcaaaattgcctaaaccgttaaatattccacccgctgtcgcacctacatttgaggtggttactcgggcaagcagagcaaataccgcagctactccaaagccccacgccatagcacttaaagacatggcagcaataatcaataatggctcagtcataatgaccatcacatacatgaagatgcccgcgagtaataaaccgctaaatacttgaattgcgcggcggcctaatttgtcagataaaaacgcaccaaccacttcgccaattaacatggcaatgaatggaaagcttgaatacaccccaaactctttgaggttgaatcctttgtcttgcatgagataagaaggaacccaactgtttaggccccacaaataagtcattaaggcaatattgaataagcacaccaaccagaacgcgctattgctcacaagtactttggtattggcgatatggcctttgaagttagtacgtttactttcaccttcaagctcaacagttttcttgagttgcaagttacgcagaccaaaaacaatgcttaaaattgcaatgagtgtgagcgcagccatcacaaaaaaagtggtatgccagtcgtggtgtgccagaacggctgccgtaattgggaacccaaggaatgcaccaatcggtgtacccagtaagaacatggttgaggcacgtgcctgctgacggtctgtataagtctgcttcacaatggtgtacgccaaagcaaatagcggaccttctgccaaaccgagtagaacccgtaaaatcaacatgcctgagtagctggtggtaaagcccatgcaaagcatgagtaaaccccaagaagtcacactccagaacaacattttctttgggttaaaaatgtcgcctaaaaagcttaggaagactgatgaaaaaccataagcaagtaaaaaacttgtcatgagccatccgagcttggctttatcttcagcaattcccatcgagctttgaaaatgtgggtctgaaaataaaaccgcaatactgatcttgtcgaaaaatgccagtactacacacaccataaggacaaaagcaggtacccaatgctttaatccacttttttcttcattactcatgtgtcattccttcgatttggtaatgagaaccagatttaatgtttacggttttaacttcatgacattaaattcagcatctgctaataattttggatctaaaacggtattggcttgcatccaacgctttgccagtttgattaacttcgagtcattaatggcaatcatattcagcaagcgattttcatggtccagatataaatagctcacctgatcttcaccaccttggcgaatcaccacttctttggttttttcaggttgatatgttcctaaaatctggatattaaagtgatattgatcagaccaaagccaaggaatatcggtatattcagtttcaattccgagcattgatttcgcagctgcaatcgcctgattttgtgcatttgcccaagactgaatgcaatagcccaaacccggatgaatcgcgacatcacctgcggcataaatgtcttgatctgaggtttgtccaaaacaattcaccacaatgccatctttcacatcgagaccagcgtgtacccctaactctttcgcgatctcagcgcctgcacctactacaacacagtcaaacaactgactatgttgaggatggttcaccacttcaactttttgatctggtgcttccactaagtgaaggctcttgctgtctaaatgaatttttgtgccttgagcctcatgcatattttttaaaaatgcagaaacttccggactcacacttcttgcacataagcggtcgccatattcaaaaatatgaacatctttcccttgcttacgcgcagttgcagcgatttccaaaccaatccagccaccgccaatcacagccacattttttgcattctttaaaatttcagccagacgttcacagtcacgtacatttcgcaaagtcacaacatttggaatgaactgccatgtattgacgggtacacgggcgcggcttcctgttgcaatcaacaatttgtcatacggcaaaatctgaccactttctaaatgaacctgcttttgctcgcgatcgacttttgttgcaatttccggtttgtgccattgaatgttgaactcttgaacctgttctggagagaacagattcaaactttcataacttgcttcttttgaaagtacttgcttagacagtggcggacgctcataaaacacgtgatcttcatttgagaccacatgaatttcacccacatatccattttgacgtaaggtactaactgcccaacctgcagcctgccccgcccctacaattacaatcttttccatagcctttcttccttgtaaagcaatgcctgttacacaggcttcacctgacggcgggttttgtcatcaagaccaccttcaatcgcccactcggtgaaaagctctagacgatgttcttctacacgtggctgccattcttcggtcaaataatcatcgttggtgtaatattcaaatgcaccacccaatggtgagttgacgtaccagaaataagcagaagaaattggatgacgtcccggtccaataaaggttgaccactctgaacggttcatatgtaaaccgcctccaatcacctcatgaatatcacgaacaacaaatgcaacgtgatttaggcccgcagatttatttggaacgctaagtaagaataaatcgtggtgataaccttcaccgcggcaacgtaagaatgcaccgcgatttttgtaagcatcagataaatgaaagcctactttttcaatatagaagttttcagtagttgctaaatccggtgtgaagaacaccacatgtccaatcgcaacaggttgacctttttcatagacaggacttgctgcattcacacgttgaatgttgccgtattggttaataccttccgttttaagttctggtacttcttttacaaaactttgttcaaaacgaatggtcatgccatttgggtcaagacactgaactgtattttcagtacgtttaaaaccgtctacatcggctaaacgagctgccaagtcttcaaggtcttgagcattttcaacaccccacgtaacttcacgtaaagttgaaccttgctcaatagcaggcggtaaacggttatcatcacaattaaatagataaatcttgctgccgttttgagtctggtataaatctgcaccttcaatatccgaagtacttttgcttaaaccaaaatctgccaaaaacttgtttgaagcggctctatcttcaactccaaactttaaaatctcgatccctgtaatcatttgactactccttagttaaagacaaaaccgccattgaccggaatattttgacctgtcacaaaagaggacaaatccgacagtagatacaatgctgttccatttaaatcttgtggaagttgctggcgttgaatcgctcttccgttgacatataaatcatgacgttcctgtggcacatactcggttgcttcaaccagagtcagccccggagacaaggtattgacacagatattgaactgccccaactctcttgccattgaacgtgtcatggcaacaattgcacctttactcgccacataagccatcaggtttggcgcgccccaaagtgctgtatcggaagcaacattaataatcttgccggcagccgattgttttaaatgtggaatacacgcttttgtaattaaccatgtacctttcacattaatattcatgacccgatcccaaagttcaggatcgtaatcaatcatattttttccaccgacattggttgcaagcgctgcacagttcacaagtccgtctagtccttgtaatacttccacgctttttgcgacagcattttcaatagagtctgcattggcaaggtcaactgttactgcatgaacgtttagcccttgttgctgtaacgcttgcgcttcttgttgcaccaagtcagacaaaatatctgccatcacaacttcagcaccagcctcggcaatagcttgagcgaaatcccgccctaaaccacgtgcagcaccagtcactaaaacttttttgccttgcaacaacgctacattagccatgagcttcttcctgcatctcgatacggtttgatgcatttagcgcagcaattttctttaattgcttttcagcttcttttttcattaaacggcgtaaacgtgcaagccctacatcgtgttgatataagaattctcgtgcacgcgcatttggcgcaaggttttctaaaataattcggtcttgttccaatacatcccaatgcaactgttctaaatgattgcgatataagaagcgccatacattacgttgccaaccactcaccttacggcagcgccagaaaaatacacgggtattgttagcatcaattggcgttgcgtaacccacaatccagaattcaccacccggaccaaactgtttacggtaaggaattgaaagacgtaaccaacttgcaccggtcgaaccatattcaacccagtcaaagttcacacctgtttggccttctttttcaaaaacaaaaccattttcagttgtgcggtgtttcatctctgcggtacgttcaccttctgccattgaatgtgaagtacagtgcaaatatgtaccgtgcattgggtccatgacgttatcaatggcatattgatggtttactttccagtctgcttggcaaaggaatgaactccactcttcgcttgccagttgttctgggaactcaagcggtgcaggttgttcatttgcatcgataccaaaccagatgaagattgcaccatgctgttcaatgaccggatagctctttaaacacttggttccagtcattgggcattcatgaacggctggcacatcagcaaccacaccatcagcacgaacttcaacaccgtgataccagcaagcaactcgatcacccaagttccagccgagtgaaagacgagcaccgcggtgtggacagcgatcttcaagcgcatgtacctgaccttcggcatcacgccaaaccacaatgttttcacctaaacgcgtaatcccaaccggattagcagcgacttcccaacttgctaaaaccggatgccattggtcacgtaaaccaagttctaaatattcttcagcgctttgtgaagttgatacgattgcgttcattttattcttccctgaatcaataacctaaacgttgcatttcttctgtaaagctctcagaagtccattcatcaccagattcagagcggaaaccctgttgattaagtgcagaaacaacctcatctaattctgttgcgcccgcagaaaatgcctgaatcaagttctttacaaagtcttgttcgtagagagtcggttctttataacgtgtttgccaaaccaacaattcagattgacctggaacttgaatattgttgatacctgcttcggttgctggcgttgcatgaatccagcttgccaacttttcattaaatttcttcattgttctgcttccttgtacatgtgaggactagagttgaatttgaatatcctgtccttcaacacgaactgggtacgtacataggtttctacacccgggtccactttttagctcacctgtctgaatgtcaaaaattgcttcgtgcaatggacattccacagtttgatcttcgataaatccttccgttaataaggcatacgcatgagggcaaacattttcgatagcgaagtaattttcatcgacaaaaaaaacaccaatttttttcccttcaacttcgacggctttcggctcatcttcgctaacgtcaccctgctgacaaactgagatccaactcataccttgcgtcctcattttgttttatatacaaaacataatttgattttcaaaacacaagctaagcataatcctcttgattaatttttgtcaaagtaaaaataaacattaaaatcaattgattaataaattttaaataatttgttacgtttcaatttggaaacaatgttttaaatataaaaattgttttatgtaatctttataattacaatagttctaaaataaagcataatgccccaattcgaaccctgttttatttataggaaaacgacacgaatgagcctagagattgaagaagattcgcaagaatcagaaacaacaaaaaatgatgatcggtatttagtaccagggcttgtgcgtggtttagccatcttgcaagcatttaatcaacaagcacaagaaatgacgattacagaaattgccgaaattttggaagtgaaccgttctagtgcatttcggcttatctatacacttgaagcttgcggttacttaagaaaggcttcacaaaaaacatatgcgcttgattcaaaagttatggagcttggttttaacagtttatcaaagctttcattacttgatttatcaacgcctttaatgaaagaactacgtgaccagaccaaacttgcagtacacctgaccgttttagaaggtacacacattgtttttgtaaataacgttcaatctatgggtacgtttaccagcaatattagtttaggtactcgctggcctgcccatgctacagttattggtcaaatgttattgtcagatttaccagaggcagaagtacgacaacgctatcgcaattttaatgactgggatagttactcagaacttactccaaccagtttaaaagcgttattgcaaaaattaaattatgtaaaaactcaaaagtcgatggtgagctgggggcattacaaccatgacatggctgcttgtgctgctcctattttcaaacaatcaaatggaaaaatggtggctgtcctttcagtcagttgcccaattaccacttatgatgagaagacctttaaagaagatatcgccgctctagtcatcgcaacggcagataaaatttcaaaatttatctattaaaaaaagcgacgttaagtcgctttttttgtactcttatttcttcaattaaaaattacgcttaaaaatttcaccattcatatcctgaaaactcagtgttgaatgattttctttaatatcaaactttaagtactgctgtttaaactgtactactgcataaaactcttctgccccatcatctaaacctgtcgcagaggcctgagtgccttgtggaaagtccttgagccaagcagcgttataaaaatccgatactgaattaaaatctatatatttttcaggctcacccataatttttgcagcaatttgatcaaactgttgttgtttataagtatctaaactcaacaacatgcttattctcccaattaaagctgcccagcatctaagttctgctttcttttaaccttttcccattgataccaaccataagctgccattaatacaaaggctgcgtataaggctgaagttaaaaacagatctttatagataaacatgccgacataaacaatatcgacaaatacccaaaggatccatgtcgcaatatgctttcggctggtccagtaagttgcaagcaaactaaatgctgcaagctgtgagtcaagcattggcaccgctgcatcggtaaagtttttaagcaccaaaccaaagagcaaaccacctaccgcggcaataatcatttgaatgatagctgtttgaactgcaataggctcaattcgaatgtcatgatcttgctgttttcctttgagccaatagtaaaagccataaaaatttacgaccataaaaaagaattgcaaaatcgtttcgccataaagcttaaattcgtaaaacaaataggcatataggacaaaagcaaagaaattaaacagccagcaccacatattacggattaccgttaatccaactccaatgaggctaattaagaccgcgaaaatttctagaggtgacataagagaagctgcttattgagatcaatttgacagcgtattatgagaaaaatataaagcgaagcaaactgctaatttaaataaatcatggaaaataacatgtctaaggatttatccttttcgcatgaaattgatttatttcaatgcacagacaaaagaaatactgatcgagttactaacaatttctatttgctagtttttcaatgattgtttaaaagataatgaaagacaaataaaagagcatgaaaatatgtcaaatcaagaaggaaaagtcagccgtgaaactcgcggacatatttttttaattggcttagatcgggcagcaaaacgtaatgcttttgatagtcacatgatcaaagacttatcactagcgctcaccgaatatgaaaataatgacgccctgcgctgtgcgattgtttttgctcacggtgaccattttacagctggtttagacctagttgagttacagcctaaactcgctacgggtgtgtttgattttagtgaaaacgaaattaacccttggggcacaataggccgaaaactgagtaaacctttgatagtggcagtgcagggttattgctataccgctggtatagaactatttctgaatgcagatattacgattgcgagtgaaaatacccaatttgctcaaatggaagttcaacgtggcatcttaccttttggcggagcaactgcacgttttactcaagccgcgggttgggccaaagccatgcgctatttgctcactggtgactcttttgatgccaaagcagcttttgacatgaacctcattacagaaatatgtccagaaggtacggagcttaaacgtgctatagaacttgctgaacatatcgcgcaagctgcaccacttgctgtaaaagcgaccctcgcctctgctcgtgaggcagtcaatgaaggttacgaagtggcttttaaccaactgcaaaaccatcttcagcctttactcacaacagaagatgttcaagaaggtgttttcgccatgctgcaaaaaagacctcctgtttttaaaggtaaataagtcctactcaagcactgcgctctacagtttaaaacttatggatataccgaaattagtgaaaaaaaagcccacatgatgtgggctttcttttataaatgtactttattcaactctaatgattttaccaaattcattatggtgaacgaccgtaattttttggctacggccctgctcaatttcttgcacaggcaaatcaaaatagcgcgcatagtcatctgtctgtttcatgttaagttcactaccttctacacggcgttcaggcaatacatgactccagagtagcaacccgactgcacaagcaatcagcgctgtaataccatgttcaatacctacaccgaatgcactgaataaacgatgtactaaatgagttttttgcagctctgccaatacccagataaacacgaatggacgccacaacaacaaccaagccgcccacatcatggctgtgcttgttgtagaagcatagcgtttatgccatggcaattgacggcgtaaatcaataatcaacgaatttgtcttcatttctctttacctaacgaagtgctgtggtttttccccagacatcaatacagcacgatctttaaaatctcatgactcttgcatttcatccacgaatgccccgatccgggctcacccaacgcgcacgtttctcatctccacgtcgtaagacttttggaaatgccacaatagttgccgagatggtgattagccaaaagaccaatggataccagatcatccagaaatagttttttccgagatgcggttcataacgactatccatccatttgcttaaagcaaactgaatgagacaggttgcccccaataaaataccgctaccatacggtaaaaatggagagctcacaacggctaatgcagggaccggtaaaataaaatgtaccaaccacaacaaagccatcgccagcattaaatatgaccagactaaagttaagcaaagctcaaacattaaaggccataaaaaattcaattttggtttggtgaacacatcaatatttttaattaatacctgtgctccacccattgcccaacgtaaacgttgtttccacaatccgtttaaagtttcaggcattaaaatccaaaccaaggcattcggttcaaaacgaatgtcccagccggcacgttgcaatttccaagtaatatcgatgtcttcagtcaacatattaggtgaccaatagtccacttggtgaacagcgctcttacgaaaagccgtaataacacctgatacggtaaataaacggccaaaggtacgctgagcacgtttaatcatgccgacaatcgaagaaaactcaccaacctgaatacgacctaataaagttgaacgggtacggatacgcgggttacccgtcacagctgcaacagtcggattttgaagaaaatgacgaaccatccactttgctgcatgcgggtcaagtaaagcatcaccatcaataccaattaaaaactcggcatcggtcattaagcttccagcttgcaaccccatggctttaccttggttttgagccaaatgaacaacacggagtttttcatgttgttcagctaatcggtcgagtacctcacctgtattatccgaactgccatcattaatcgcaatcacttcaaaatgaggataatccaattttaaagcatgagtaatcgtttcctctgcattatccccttcattaaaacaaggaataagcacagcaactttaggatagctttctaatggagctggctgatcataaggcggagctttacgttccttccaatagaaaatgatcgcgccaatcatccataaatacgacataaataatggataatagaaaacgaattttaaggcatgcgaccatatagcagcaaagattgtcatgtttcagcctcgcctatggcacaagacgagatgatttttcagcaaatgctttatgcatcacgttcacgtccggatgatctttgattgggtcatctggatagtatgcaacgtgcattgcaccttgctgatagagtgagtgaattgttgctgccatttcagttgacggtaccttttcgttgttacgccagtttgttgcttgtagctcaaaaactgttttcttaatgccgtttggatattttttcacgcgatcaatcatgtctttataaaattgatcggcgttatcgacctgctccatataaggcattgccataatagccgtaaaatcataacgtcttaatgactcttcaagcgattgtgaataccagttttccgcatatggttttaaggcaacttgcgcatataagttacgagctgtaagcaagaacggttcatattgtcgcacgtcttcaacaagttgcattgcaaaatcatctagatattttgtcttatatgcggtccatttttgcaaatcttgatcgttttcacggatttttgccaaatctgttggtaagccttgtttcgcataagcttttaatgcatctgggcttgcatcttcataatcagataatgtgacatcgtcatggaataaaattccattgaaagatgctgacttagccaaatcttgataaatctcacgaatagtttggcgtgcctctggtgagaacggacttaaacggatataccccatatttaagtgttcaccagcttttgcctgctctgtcacgactaaatcttttgataccggatcagtttttggtaattcccaagccaataaaggcatccaagcataaatacggcttacaggcgtacgggtttgaatttgccatgctacacggttaaacaagtccgcacgcattgggatatgacggttcgggaaatataccatatcggcagaaccattagcatccggatctgaaaatgcctgcaaataaactgtatttacacccatcgcattaattcgatctaacaagtgacctaaatttcgttcttgttgttgcggatccggatcataaatatagtcgagatcaatatgcatgattttttgcggacggttgttatccgttaagtttaattcacggttcttaatctcttgagccaaatcattagtactcattccgccctctaccaaaatacggctcatattttgtagagattgtttcgcatgatctgcgccatcatcaagcgtgatggtaattggcataccaagctttttagcaatttggaccgtttgcatattatagcgaccatatggccacaccataatacgtggtgaacgtataccatgctctttaagtagctgattattcttttttaaatcattataaatacgagcctgatattggctgtcattttcataagttttagtttttacatcataaaaacgtgtcgttgccgctggttcagagttcccttgcgggttgcctgtaataccgcggtgtaaatgatagctatggcttgcgatttcaacaaacccgctatcttgcatttctttgagctcaccccagcttaagattttatcacgtggaatttcttcacccgaaaaatcgactttctgccctgcttttggctctaaccatgaacccactaccgcaagtaccactgggatttttttagccttaataacaggatatgcattttggtagaaagactgataaccatcatctacagttaataaaacgggcttggttggaagtgccgccttgccctgatgagcacggatcaactggtctacggtaataaaatggaagccatttttttgcagccaatcgacatgctcagtaaattgttgagtggtgaccgcatattgaggaattaaggcatttttagtatcggtaatttcatgatacccaatgaccgtaagtgttgaagcatctattttaggtgggttagctaatgccatacctgacaagcctgctagagccaagccaagcgtgaggttcaacaaaggagatgcaaagcgggtaatcatgaaatagcgtctcaatagcaatatagattatttatgtgaaatttaaacttaagaactaaaattcacatttatttagtccttaagttcaaactgctccaacagaacagtttttcagttcacctttataattaaataaactgaaaataatcttaaatatttaaaaagctaaaatataaatatcgaatatatttatatttaaagcttatagataaagtcgagctctaaacggtttgatttcaatcatcgcgagtttttacatcaaataattcaatttcaaaaatcaaatttgagtttgccggaataattttacccattttgcgttcgccataagccaaatgagcaggaaccataagtttacgttttccgccaactttcattcccataatgccttggtcccaacctttaatcacacggcctgtaccaataacacactcgaaataatttccgcggtcaagggaagagtcgaatttagtgccgtcttctaaccaacctgtatagtgagtcgtaattaaggcacctttaaccgcttctttaccttcgcctacttttaaatcgataatttctaattcagtgatcataatattcccgttcgtttaatttcacagctcagacttgatctttagtctaacaagtgaatttgtaaaatttgttgcgcttttcagttttactgtaattgggtccacacaacattcgcttggcccttgtcacttaacaaagtccattcgttgtccataacatttaactgaagctgcatggtacgttcacaaagctgctctaactctgctgtactttcaggtgctagctgccaaacttgaacattactcaatgttttaattttactgtttctcttccaccaatcttcaacttgtgaaccataagcgacaattgccacagttttacaacgggcactggcttttttcactttatcttcagacggtaaaccaacttcaatccaggtttctaactgtcctgttaagtctttttgccaaagtgcaggctcatcggtttcaaaaaggtctttggtaaactcaaggctatcacttgcgaaacgtgcaaaagccatgacacgaaccattaatcgttctaaagtttcagaaggatgtaaggcaagcgtcagttgataatcgccataaatatggtcatccatattggcaatattcagatctgctttataaattgttgctttaagcgccatagttaatatgtccaaaaatttggcgctaagaatactcgattttaattaaaaaattatagaaaaaactcagtaatgtaaaacttcttatcctctccatttgcatcttatttcaaaacatctaaccactttcaaagttggcgggctttttgcttgaaaggggttgtattcctctcttgatttgatgacttatgtggcaaaaacttaaacgtagtttattcctacaagtcctctgcgctctcttcctcggtattgcagtaggtcttgcttttcatgatttctccctagctttaaaacctcttggtgatggttttatttctctcattaaaatgttgattgctccaattgtattctgtgtagtggtactgggaatctatggtgcaaacgatattaaaaaaatgggcaaagtcggtgcaaaaacgattctttattttgaagtggtcacgagtattgctttaattttgggaattattgttgcttatgtctttaaaccgggcgtcggtatgaatatcgatattactcatttagatgctaaagatttaagtacctataccgaacgtgctcatgacatgcatacaggttcggagtttttactcaatattattccgaaaacatttactgccgcttttgctaacggcgatattttacaagttttactcatcgctattttatttggcgtttccctactgttaattcctaaacatttagcagagttggtccgtcaagcgcttgaagctttttcggaagtcttctttaaaattatgggactcattattcgcttggcaccgattggtgtatttggttcagttgcttataccactgcaaaatttggattagattcactcctgcaactcggttatttagttttactcttttatgcgacttgcattttatttgttgtcattattttgggttcaattttaaaactcaccggactgaatatctttaaatttgtcggctattttaaagatgaactcgccattgttttagggacagcctcttctgattccgttttaccccaaatcatgaaaaagcttaaaaacttaggaattaaagattcaacagtcggtctggttattcctaccggttattcttttaatttagatggcttttcaatttatttaacattaggcgtgatctttattgcacaggcctgcaatatcaatctctccatgcatgacttactggctattttattggtttcgcttattacatcgaaaggtgcacacggcataccggggtcagccttagtgattcttgctgcaacactttccgtaattccaagtttacctgcaattggtttggtacttttactgtctgtagactggtttatcggaattatccgtgcctgcaccaacttaattggtaactgtgtggccaccgtagtcattgcccattgggaaaaagacatcgatcatgcacaagcgaaacaagtacttaatataaaaaattaaatctctcatagagaatattgaagtatttcaatgttctctattgttcaattctgcaagctaatagttcagtttcaaatgctagccagtcatgttcatgttggctaatcatttcaatgcggttatcaatgccctcttcaccagacttatagttaaactgctcaggattaaagttaaaggtcttccatccctgatctgtattaaaaattcccttaatacgtagccagtcttgttgtgcacacaacacatcgagcaaagcataaaactcaaatttccaacgcttaggaaacttccaacccgcgaccatataaccctgcgccgactcgacataatgataaggcagttggtgaatttcttttgcaacttcggcttcagtcatttgcttttgcagcttgagtaaaggctgtatagagcgtgcagttaaacgcgcaggcacatcaatttgcgccagttcaagttgaccatgttcagtctttagccattgttgctgataaggttggtattcttctttaagctcaacaagtgcctgttcatcttcaaaagtcatggtatcggcatgagagaccaccacaatctgtgcagcttttaattgatcttcatataggttttgcttggcccaattggtgtcatgcaaacgactaccatcaaccacggtcactagtgcacgcatagctaagctgttttgccaatgcggttcagttaactgatcaaataattgcgaaggatgcccaagccctgtaggttcaataaagagtcggtctggcttttgttcacttaacaagcgagccagagcaatatgcataggaagttggctactacaacataaacagccgcccaatagttctttgactgcataaccttgatcttgaggtaagagttgttgatcgactccgatttgcccaaattcattcattaagacagcccacacttcacctttcggtttctgacttaataaatgttgcaataatgtcgttttccctgctcctaaaaaccctgaaataatatgggtaggaacagttttttgggcaatcagtttcacaagcggctcaaatcaacaaggtttaaaaactaagaaaggtatatcactgtttaagtagcatgaaaataatttttcactttgaagatatacttttcaattatcaggctaaagcaccaaatatgtgacatgcatctcatcatttatctaaattaactttagaaaaataataattaaacgaaatatcctatttaaggacattcacaattcatgccaaagtgttttgtttacgtaactaacttgctttttttttactcaatacgaaatattctttcacatttttagcgctcaagtagcgctttaattttacagtagacgcacataaacggacgttatatttcatattgttaagataggcgtaatagattgttaagttaattgatgtaatcccaagctcggcttagcatgtgtcctagcttaatcattcagccctatatgttctatgtaggtcagaacgattaggtttgatttattttttaatgaatttaaggatgccataaaatgaaattagctaaaactttactcgctactaccctagctttaactgctgcttcaactttcgctgcttctaagcacgaccaagcacataacactgctggtgaagaaaaagttgttgtttcaactcaagaacaagcaaacactgcaaatgctgcttctgacgctgtaggttctgcttctgaagctgctcctgcaactcgttaattatctctgcactctcctccaagctcagagataattttactgaaacgaaacaggacgttaaatttcggtgaagaaaaaagatcgaaccatgctgcggttcgatcttttttttaagaagttttcttatacatgctacaagaagggttatgattctcttgtaggcgcaacaccttacgatgttcagccgcttcaaatcggcaacgtttccactcggtatctaaatttaatttaggcacttcgcgtggtttaccatgctcatcaaccgcaaccatagtgaaataacagctattggtatgacgaacggtacgcttttgaatgttttgagcctccacacggatacccacttccattgaagtacgtcccacatggttcacactcgctaaaaatgtaacgagttcacctacataaataggttctttaaaatttactttgtctacagacaacgttacgacatagctgcctgaataacgacttgcacaagcataggccacttggtctagtaactttagaattgttccaccatgaacattacctgaaaaatttgccatgtccggtgtcattaaaactgacatggttaattctgactgatcgtcagttacggttgtcatttcatctaatgtaggcatgactcaactctgtctcaaacaagctcagaaaacattatggttgataattcacaaaaaaaacatgcttaaatccacaacatagcatcgtattttttaatattgttaattctttttttgaacgaatattttttaagctattatttttaataattttttagtttttcttaaataaacaattattgagcggtcaaaaataatcaaaagatgctatgccattttgttccattttaaatgacacagcatcgttttatatgaggttcactatactttatggatcagtccggtaacgccattaataatcatatcaacagcaatcgtaccgattaataaagcagataaacgcccaacaatatcgaaatagcgatcgatatattttgcatgtttgtaccgcaaatgatcatgtgaaaatttcatcaaaatcaaaatactgcatgttaaaaacatggtaaacccgatcacaagtgccgcagcaccaatcgacatttcaatacctgtcaccacagctgcactaatggtacctggcccaatcataaaaggcatggcgatagtgccagccaaatgttctggtgcaccgcgcatttcaccaatggtatctgcaccctgaaacacatagcggtaaccaatcaccaaaaagataagaccgccaaaaatctggaaagcctcaaagcgtacattcaggtatttactaaagattgcttcaccgccccatgcaaacagcataaagacgatataagcaatcaagctcccctgaattaaagctttgttaaataccttggtttctgaatggcggatgaggccaatcatataaatgctcattaaaaaaggattgagcaaagagaaaaataaagcaaaagaatgcagatatggtgaaaccatgcatattccccttaagcttgtggatctgggaataatggacggttcccagggctaatacgattaatatgcaagaacgtcatatgtctttcatatttatctaaaatgtcattaataacctgttctttactgtaaccaacaaggtcgttgtcttgagaaccttcataaagataggtttcgagacggtaatagaactgtttgcctcgttttacacgctgactaaagttaggcgcgctataacggacaggccaaatctgataaacgaagttttgctcttcttccaaatgaatagtgatatcgaggtgatatagcgcctcttcatcttcaagtggtgtttgctgcacatctacgttcataccttgcttaatgagttcatcggcaacagcttgaacggcaggtttgcaaacggtatcgagcattcgtctggtttcagtcgttcctggatgatgcataacccgagtcaaacgctgtttccaattgagaatatcgacgttacccaccacaggtgccgcgttcatacttcgactggcatgcctgtagtcttcaagtctgagcgacttataaagccccgccatgacaaggaacatcacgaaactaaacggcagtcccataataatggttgcattctgcaaagcggtaatcccattggtcatcagcatagcgagtgttaataacccaatggcaattgcccaaaacacgctcaaccaacgcggcgcatcattatcaatatgggtaagcttggtcgtgaagttacctaaaaccaatgcccccgaatcggcagaagtcacatagaataaaaggcccgttactgttgcgactgaagcaataaaggtaaaacctgggtactgcgctaacaagtcataaaaaccatgtgccggattagataataccgttgcagctaaagtctggttgccttcaaaaataacactgtgcaatgcgctattaccaaaaatggataaccaggttaaggtaaataacagaggaataattaaagtcccgcacacaaactcacgaatagtacggcctctagaaatacgggccaaaaataaccctacaaatggcgaccaagcaatccaccatgcccagaagaacaaggtccagctgctcatccaatctttaggttgctcaaaggcaaaactttgtaaggctaaggttgggaagcgagttaaataatcaccaatattttgtaccagcgcattgagtaaaaactcggtattgcccaagaacaaaataaacagtaaaagaccaatcgatacataaatattgatttcagacaaaatccgaaggcctttatttaccccagatgtcactgaaataatactaataccgactgcaatggcaatgagtgcaaactgcatccagatattctctggcagtcctaataaaacatgtaaaccataattcagctgtaccacgccaatcccgcaggtggtcgcaataccaaaaattgtcccaatgacggcggcagtatctacactatggccaattgccccattaatcctgttcccaaaaattgggtaaagtgcagaacgaatggtaagcggcaagttgtagcgataactgaaataaccaagggccataccaatcaaggcatacatacaccatccggtcaaaccatagtgaaacagcgtccacaccatactttggcgtgccgcttcataggtttggcctactccgacaggcggctgcatataatgagataatggctcagccaccgagaagaacattaaatcgataccaatacctgccgaaaacagcatggcagaccaactcagtaaactaaactcaggctttgagtgtttagggccaagtttaatctcaccataccgtgagcaggcaatgaaaattacaaacaccatatacagcgttgcagccagtaaatagtaccagccaaaggttgacgttacccacgcaaggacggtgttaatggttcgatttgcgaaatcgttaaataaaaaagtaacgagagaaaagattaaaatgattagagctgaaatataaaaaaccacacggttaagcgggtcttttttagatttagataatgttaaatcatcaactgctcttggattatctgttgccatacaatcctcaaggaatagaagaaaaataaaatattcaatttagtcttttcactatttaacaataatgaaaagactgctttgaacgcaaaaaatataaataaatgtgatgaaccaaggttataaaacctcggtcactttgttctggtcacaattcgatggaatagaaatgtcttgtgaaatagctaactgctttttcgcaacattcgggtcaaaatcatcttgctttaaggctttggctagaccaaacatataaagcaaaataatcacagaaaatggtaaaccacataacaccactgcactttgcatggagttaaaactacctgctaataataagccgatacttacaatggtaatgaccacagaccaaaagatgcgtaaccagatcggtgaatcactatcactggtgccccctttcgaggacaaattggcgatcattagtgtaccagacccaaccggtgtcaaaaataaaacgaaacaaattacaacaacaatcccggcaatatacggattaaacgggagatattcgagtaatttgaataatgacaacgcagggtcacttaaaaccatatcacctaaaactttctgtttttgattgagaattaaatgaattgcagtatttccaaaaatcgagatccaagccaaggtaaaacctaatggaatgaggcatacacccaaaaccacttctcgaatagttcggcctttggaaatgcgggcaataaacattcctacaaaaggtgcccaagcaatccaccatgcccaataaaacacagtccatgaacccaaccagccactggctttttgattgtataaatacatatcaaaacttttacccataaaattattaaggtaatcgcccgtattttgcacaagaccatttaacaaatggttcgtcggtcctgttaaaaatacaaataaaagtaaggcatagagcaaacgtaaattaatccgtgataaccatgccaagcctttttcaatcccgaccactgtagtgaccgtcgccacaaacatcatgattaaaactgcagtaattaaagttgcagagttatcaggaatttcaggaattaaataacaaatgcctgaaaccaacactaaagcaccaatacctaagttggtcaccaaagaaattacggtcgctaaaataccaaagccatcgacaaaatcacctaccagaccatgaactcgctctccaaaaattggatagagtgccgagcgtagtgcgagtggtaaatcttgtctaaaggcaaaataacctaatgtcacacccagcaaggcataaagcacccagccatgaataccccagtgcaaaaagctataggtcatggcattgcgggcagcctgaatagtgcctgcctcaccttctggcggtcgtagaaagtggtcaacaggttcagcaacaccataataaagtagcgcgataccaatacctgccgaaaacagcattgaggtccaagccaaatagccaaactcaggtttgtcgtggtcttttcctaaagggatctgtcccactcttgagaaggcaagccaagccacaaagcctaaacacagcacaatcaccaacatgtaataccacccgaaaaagtggtttacctgctcttgcacataggtcagccaaaactgacttttttctggaaacagcacaaataataggccaaaaatgccgatactgactgccgaactccaaaatacaaaacgatttaaccgaatatggtctgaagaatatccatcacttttcaacaccatcttattgctccttgcaatcggtgtattttttccaaaataacgtgataagtaccggacttatgcgcatcatcctatccgtaagaacttctgattctatctcttctaccccgaagtaagattcaaaaattcattgatttttacacatcatacttgttattgattgaacgttcaatcaataacaagtatgataaaaaaagtgctatgatgctctgcaagttaacatgctgaatttaaagcacccataaaagtgctgatgtggacaatcatgacaaaacgcagagtaaaaccagagcatgtgcgccgtgaagagattatgaacgctgcactcgacgtaatttatgaagtggggttatccaataccaccattgcacaaattgcaaaaaaagccgagttgtcgaccggtattgtcagccattattttggcgacaaacaagggttaataaatacctgtatgcaagaaatgctcaatgttttgcgtcggaaaaccgaacagtacagagcagaagcagattcgcatccggaaagccagattaaggcaattattgattctaactttgacattagtcaggtaaatgaaaaagcaatgcgggtctggttagacttttggtctgcaagcatgcatgtaccggacctgagccgtttgcaaaagattaatgatcaacgcctgtattccaacttgaagttttattttctcaagttaatggatgaacaacaggccagtgttgccgcaagaggtctggcagcattgattgatggattatggctacgtggcagtttaagccgtcacaatgaatttgacagcgaactggcccgttccattgcttacgattatgtaaaaacgcaattgcaatttgcgaacaagcctttgcaggagagacaaaatgagtgatgtacaagttcatcaattgtatatccatggacgctacgttgaagcaaccagtggtaaaacatttaatagtattaaccctgccaacggcgaaattatcgcgactcttcaacaggcatctgaacaagatattgaagctgctgtaaaaagtgcccaacaaggacaaaaaatctgggcagccatgaccgctatggagcgttcacgtattttacgccgtgctgtcgatattctccgtgaacgtaatgatgagcttgcccgtcttgaaacactcgacaccggtaaagcctacagcgaaacatctaccgtcgatattgtgactggtgccgatgtactcgaatactacgcaggacttgcaacagctattcagggcgaacaagttccacttcgcgaatcaagtttcttttatacacgccgcgaacctttaggcgtggttgcaggtattggtgcctggaactatccaatccaaatcgctttatggaaatctgcccctgcccttgctgccggcaatgccatgattttcaagccaagcgaaacaaccccacttactgcattaaaacttgcagaaatctatacagaagctggtttaccagacggcgtatttaacgtggtacaaggtgctggtcgtgaaatcggtcaatggctaacagaacatcctgtgattgaaaaaatctcattcacgggtggcgtagaaactggcaaaaaagtgatggcaagcgctgctggctctacactaaaagaagtgactatggagcttggtgggaagtcaccactcattatttgtgaagatgctgaccttaaccgtgccgcagacattgcggttatggcgaacttctttagctcaggtcaagtatgtaccaacggtacgcgcgtatttgttccaaaatcacgtttagctgactttgaaaaagcggttgtagagcgtgtacaacgtattcgcattggtgacccaatggctgaagacacaaacttcggcccgctcactagcttccctcatatggagaaagtgttgtctttcattgagtcaggcaaacaacaaggcgctaaagtattaatcggtggtggtcgtgcgacagaaggcgaacttgccaaaggcgcttatgtactaccgactgtatttagcgactgtactgaccagatggcgattgttcaagaagaaatttttggacctgtcatgagcatcttaagctatgaaaccgaagaagaagtgattcaacgtgccaacgacacgacctttggtttagctgccggtgtggtcactcaagatattagccgcgctcatcgcattattcaccaaattgaagctggtatttgctggattaacacttggggtgaatcacctgccgaaatgccagttggtggctacaagcaatctggtgtgggccgcgaaaatggcttaaccacgcttgggcactatacccgtatcaaatctattcaagttgaacttggcgattatcaaagcattttttaatgcccctatcgctctaaacacttcaacctaaatcacatatgccgagcagtctttatagattgctcaggcaaactgttagtaaaaaaaggatagttatgaatattaaagaatatgattacattattattggcgcaggatctgccggaaatgtactcgctgcgcgtcttactgaagacaaagataccaccgttttactgctagaagcaggtggaccagattatcgcttggatttccgtacacaaatgccggcagctttggcctaccctcttcaaggtcgtcgctataactgggcttatttaactgacccagagccacacatgaacaaccgtcgtatggagtgtggtcgtggtaaaggcttaggtggctcatctttaattaatggtatgtgctatatccgcggtaacgccatggatttagaacaatgggcaacccataaaggccttgaaaactggacttatgccgactgtttgccttactacaaaaaagccgaaactcgtgacattggtggcaacgactatcatggtgatagcggtcctgtatcagtggctacaccaaaaaatggcaacaacgtgctgttccatgccatggttgaagcaggtgtacaggcaggttacccacgtactgacgacttaaacggttatcaacaagaaggttttggtccaatggaccgtaccgttacgcctaaaggccgccgttcaagtaccgcacgtggttatttggatatggcaaaaggtcgtccaaacctgactattttgactcatgcaacgaccaataaaatcttgtttaatcaaaagcaagcgattggtgttgaatacattattggtgctgatcaaaacaacttgcaacgcgctttggttaaacgtgaagtattactgtgtgcaggcgcaattgcgtcaccgcaaattttacagcgttcaggcgtaggtcaaagtaccttcttaaaatcaatggacattgatgtggttcatgatttgccgggcgtgggtgaaaacttgcaagaccacctggaaatgtacttacagtataaatgtaagcaacccgtttctttataccctgctttaaaatggtataaccaacctgccattggtgccgagtggttattcaatggtacaggtattggtgcaagtaaccagtttgaagcgggtggatttatccgtagttcggatgagtttaagtggccaaacattcaataccacttcttgccagtagctattaactacaacggtagtaatgcagtaaaagaacatggcttccaagcacacgtgggttcaatgcgttcgccttcacgcggtcgtatcaaacttaaatcgaaagacccgtttgcgcatccaagtatcttgtttaactacatgtcgactgaacaagactggcgtgagttccgtgatgcaatccgcatcacgcgtgaaatcatgcatcaacctgcgcttgacccatatcgtggtgatgaaattagcccgggcaaacatttgcagacagatgcagagcttgatgactttgttcgtaaccatgcagaaacagcttaccacccgtcttgtagctgtaagatgggcgaagacgaaatggctgttgtagatggtcaaggccgtgtacacggtatgaatggtttgcgtgtagttgatgcctcaattatgccgctgattattaccggtaacttaaatgcaaccaccattatgattgccgagaaaattgcagaccaaattcgtggacgcgaagcgttaccacgttcgactgcaccattctatgtagcatcataaaatcttaaagggcatatttcttatgcaggaatatgcccttaatttattatttatagcactcatattaataagaactatgtatgacagaaaataaggtcatgcaaggttattaattacatcaataggtcataaattaaaaattcacctatttttatcgaagcatatccttcaaatggcttaagtttaaccaaatttattttattaatttattttcaataacttacaataagattaaaactaaaaataatcttattaaagtttaatttgattaaatataaatcatatttatgattttaatagaacccatttattataaaaattgtattgtcaatgcaaaattagtctaaaatatagagtgtttgcgataatcccaagtaatttttcttttttcaaagttctctgttttagagaattttactttcgcatttatatccgttttgtctggatacgctgtctaggtttcctcacaccttaagtgactcaaataacttattttaaggtcccccttacatgaaaaagtttttgaaataccttctggtattaatcattcttattttaattgcgggtattgttttcttgtttagaccgattgcgtcaaaacaagtacaaactgcaaaagatgagccagttgttgatgctgttcttgttggcggcggtatcatgagtgccactctcggtacttatttcactgagcttgaaccgaattggcaaattcgtatgtttgagcgtcttgaccaagttgctcaagaaagttcaaacggctttaacaatgccggaacaggccactctggctttatggaaatgaactataccgaagagaaaaacggtaagatggaaattgccaaagctgaaaaagttgcttctcagtttgaagttgctaaacagttctggtcatatcaggtaaaacaaggcgttttagctgaaccaaaaacattcattaacccagttccacacattgctttcgtttggggcgataacgttaaattcttagaaaaacgttatgctgccatgattcaaagcccgcttttcaaaggcatgaaatttactgaagacccagctgtgattaaacaatgggcacctttagtcatgaccgatcgtgatccaactcaaaaagttgcagcgactcgtatggaagttggttctgacgtgaactatggttcaatcactaaacaattagtgaatcacctaaaccaaaaccctaacttcaaattacagacttcaactgaagtgacaggcatcagccaaaatgatgacaaaacttggacggtgtctttcaaaaatttgaaaactggtaaaacagaccacgttaaaacgcgttttgtatttatcggtgcaggtggtgccgcggttaaattattgcaacttactggtttaccagaagcgaaacaatatgctggcttccctgtaggtggtgagttcttaattactgacaacccagcaattactgctcagcacacagcgaaagtatatggtcgtgcggaacttggtgcgcctccaatgtctgtaccacatattgatacacgttatatcgacggtaaaaaatatgtattgtttggaccatttgcaacgtattcaaacaagttcctaaaaaatggttctcaacttgacttacttgcgtcaacaaacaaaagcaacgttttaccaatgaccactgttggcttggaaaaccttgatcttgttaaatacttggtgagccaagtcatgatgtcagatgaagaccgtctcaatgaacttcgtaaatactacccagatgcgaaagctgaagactggcgtttaagccaaggtggtcaacgtgttcagatcatcaaaaaagaaccaggtaaacctgcaacacttcaatttggtacagaaatctttgcgtctaaagatggtgctgtaactgcattgttaggtgcgtctccgggtgcttcgacttctccatacatcatgcttaacttgcttgaaaaagctttccctcagcaaactgaaggtaagtggaaccagaagcttcatgaaattgtggtttcttataaacaagacttaagcaaagaccctgtgttactcgacaaagttcgtcagtacacaagctctacgcttggcttgaactatacatctccgttcaaagctgcaaacgatgaaactgctgctgcccctgttgcaaaagcaaactaagtttgatgatgtataagtaaaatatcaaaaggatgaatttcgattcgtccttttgttttttaagacttctgttgagatatttagacttgccatgacgcctttaaaatcatcacctcgcctcttaccgttttgttttaagctcgtgcttgttttgctactggcttatcttttgttaagcgggttttatatgtggatgattggcggtacagctatttacgtcagctcagccgtgttatttgtcataacagcttatgcatttaagctcggtaaatatcaaaaactatgtgctgttttaaatgtgctcatgagcgcagccgcactatatttcagcatggctcatctatttttttcccctatccagttctttatatttttacctgcgctattttttgttgtgttggcttttactcaagtaagtaaagttcgtagtttatctaaagtactcatattaattagtttattgatttggtcaggcgtacattttacgcagcttgaacaacttaaagcgtattatcaaacacagcatactggtgaaagctggcagcaatacggcgcgctataagactatttttagtctctatacttcatgaatatctattttctttttcacatgaagttcatcagtaaaactgaacagcatttacagaattccttttaagaaaaaatattcataacaatctaatttatttagaaatatatcgagcatattagcgattgaatagcattcatctacacgctagattagctgaattatttttctccctttacgttgtaatttatgaaaattttagatggcggtttaggccgtgaattggctcgccgtggcgctccgtttcgtcaaccagagtggtctgcgcttgcactcattgaagcacctgaaacagtaaaagaagtccatctcgactttatcaacgctggtgcagaagtcattacaaccaataactatgcggttgtgccatttcatattggtcaggaacgttttgaaactgacggcgtgcgtttaattaaagttgcgattgaacaagcaaaaaatgcagttaaagaaagcggcaaaaatgtcaaaattgcaggctgcttacccccgttatttggttcttaccgcgccgacttgttccaaccgggacaggctaaaaatcttgctgagccaattattaacacattggcaccagaggtagatttctggctcgctgaaacccaatcctgcttaaaagaagttgaaacagtccatgcgttattgccacaagatggtaaggactattgggtgtcatttacgctgcaagatgaaatcaaacaagaacaagcattacttcgctctggcgaaaacatgcaacaagtggctgactttataaagcagtcaaatgccaaagcagtattgtttaactgctgccaacctgaagtgatcttgcaagcaattaatgaaattaaaggactcattccagagtctgtgcaaattggtgcttatgccaacgctttcccaccgcaagatgaaagcgctactgctaacgatggccttgatgaaattcgtaaagacctagatgctccaacttatcttgcttttgccaaacaatggcaacaagcgggtgcaagtttagtgggcggttgctgtggtattggaccagaacacattgctgaactttctcaattttttaaagaataaataccatgtctgctgccaaaatcggattattgtctcttacagcgctggtatttagttctatggtggggtcaggcgtatttagcctcccccaaaatatggctcaagttgccaacggctctgcccttcttgttgcatggctcattaccggagtcggcattattttcttggccctgtcattgttgcatttaactcgtcaacgaccagatctagatggcggtatttataactatgcacgcgaaggctttggagacctcatcgggttttgctcggcgtggggttactggttgtgtactaccattggtattgtcggttatgtagtgattgccttttcaggtgtcggcatgtttaccgacagcaaagaccacgttatttttggtgaaggcaatacgctctactctctgattggatcaagcatttttgtatggctggtgcactggttagtaagccgaggtattaaagaagctgcgattgtgaatttactggcaaccattgccaaaattattccaatggtggtctttatcttctttacttttattgcctttaagtttgatttgttcaaactcaacttaaatgacttctctttaaaagttcccctttggcagcaagtaaaagacctaatgctcattaccctttgggtatttaccggtattgaaggtgcggtggttttatcatcacgtgccaaaaaccgtcatgacattggcaaagcgactattttaggtgttttactggcattaagtttttacgtgatggtgacagtgttggcttatggtgtggtgagccgtgaagcgcttgcgggcatgcataacccatccatggcgaccattttgcagcaactcatcggtctacccggtaccatcattattaccattgggcttattatttcagtttcatcgtcttatttaagctggacgttatttgcgactgaaattccatatctagctgcaaaaaatggtgctttcccgaaactatttttaaagaataaccaaaataatgtgccgatttcatcactatggctgaccactattgtggtgcaaggttctctgattgccgtgtattttttcaataaaaactatacccagcttttattgatttcatcggtgatgattttgctgccttattttctggtatcggcgttttatcttaaagaatcgattcgccacaaacgcacgccgcatattgccattgcaagtgtcgcttcaatctatgcactttggttgctctatgcagcgggtttagacttactgctgttgtctggtgtattgtatttggttggcttggttattttttcaatcagctactttgagcataaaaaatcgctcaaacaaaatcagcttaattaatcatttcaaccactgttgagctatttcagcagtggttttctaaaaacaaaaaaactattttgaaggcggcgactgctttaaatgcaatcgtaaaatacggcgtaattctaaaattgcctcagggctagtttgaatcgaatgcccacctttaataatcagctccgactgctccccacccaaatgtgaactttgatacggcacaatcccatcgctcatttttgacttatctgtcgtaccatttatgttgcccataattgagtgatagaccacgttggacgagggttgaatggcttgggtcaactgcataaagttagaagaacgacttaaattactcgctccattttcaattaagccttttctgagtttggtatttttctcatctctcatttcaacggcaataaaaaagtcggcaggtaagcgaataatacggcgagcaatttgggtaaaccatcggtcagcatagtcagtaccatgatgcggcgccgaaacaaaaacaacccgcttaaaatagggcaaatctttgaactgaaaacgttctcgaataacaggattttcttttaaacgctttagctgtgcttcattcattttttgcatggctaaatcagaaacgtctgcatcgcttactagtaagcggctaatcactccgcccatactatgcccaaccaatacggcatcatgtgcagcgtagctgtctttggcaacgttttgaaaagcctgattcagcaaagaataaatctggaaacgactttcaaaaatcggcatattggttgaataaaacacctgccaaacttggtagttttgtcttaattcggcatcacccataatgtcatttgttaggctcacccatgcctctgggctgcttgccaagccatgaataaacacaataatttttttattggggttaaaaggttccagcatatataaatgcggcataatcaaattggcttctttattaattaaagaccaatagcctgctgcacctaaattatatttcgataaccatagcccataaggcgccgaatagtttgcagtaagtggatagtccacaccttcaacttttacacggtcctgtcggtatgggtcaaacatggcaatttctaactctgccccatcaatgacctgatcggctgtggccttttgttttgggtaagcaatagccgtgactggaaagaaacgtggtaaatgaatgttgggattactctggtaagcataaaaagcatcgggatctaaaataaaaccatgatttacatcatgctccttacgtcccacaataaactccgcacctaaaccatccttacgattgacggtattaaaccctgaaaagttcatgttatagctagagcgaaaggtatcaacttcaatgtattgtacatctacagcatgatcaaagttaacgtggtactcatgcccatctgcttttagtataggtgggaaatgaagcgtatttaaatgattaaaatacgtggtcatgagcttcgacaaggcgacgttataaaaaatacgtacctgattttggcgatggtcaaatacccgatcaaaaggtggctcttcagaatcaaacaaatagacatagctatagcgcaagcttttatcaaacaacgccagctcttgctcaacacaactgttacttttaagagtgacattacactggctactacgcccaacatctaaagcttttgccaaataaatttcactcagcgcagcatagcgttcttctctgctgctattttcggacaggctctgaaccttatttaaacaatcatcaaaattttgtaggcaagttttttcatcttctttgaccaaatacagtaagttttgggtctgatgacttagagtattatcggtcaaaatgctttcatttttactttttaaagcactgcttaagttactttcttttaaatgaatgacctgacaaccgctcagcagtcccattattgtaagcactaaataatggccggattttgtcattgtgcattcctttatcgaatgtatttccccacccatcattatgcctgtaaagctgtgcctgaacaatttcggctcagctttgattggaatttatttggaaaataaaattgaccgtatattttattaagcttgtttaaacttctgctgggaagccaaataagaaaaataaaggataggtaaaataaacggcgctacgctccaaaagtcaaaatagacatagagtaccgcccccattaaagcacctatgacaaagccaatgacaatactggcacttttaagcaaacttgcccgattggcggcattattgtttttaagcaagttggcaatatcaatcccaagctgggtggtgttgcctgtcatcatggtacttgggctaatatttttaataagggttttgcttgatgtattacgaatcgccaaagcaattaaaccgaggccaccagtgattgcaaccgtaatcgaatcggcatttttaaatggctcaaagtaaagcccagcagccataaaagcaaagagaaaaatagcttcaaataaaaataaataagacagcgttttgtgtttggtctgactacggtcaattaaaagtttggtaataaccaccgtcacaataaacaatggaatagccgcaagtttaatccataaaccggcaccacccttcaccaacgcagccccggccaataccaagttgcccgtcacatgagcagtaaaaaaaccaaataacgcgataaagccaatggtatcaattgccccgcccaccatagtcaataaaacaggatctcgacatattacccacgtactttgtgtttcttgttgaattgaagtctctggcataagcagcatcctgttcttttaaagtcattaaattcagtacgaagatgttttaagtatttaaaaacaaatcaaagctaaagcatttatcaaaacaaaaaagtatgtaaaaacatagagtgtttaatgtcgcaacactgtcttcaaaacagcaacaataaaatttgtttatttttaaaacattaaacgcttctcatccgcaaatcaatttgacctctaaaactgttctaactatgatgaagccgcaagtttcgccaatattttgcacaaacggctattgtgctgagtgattgataaagaaaacaacaacgacgagaaggaatatgtctctttataatttttcagtttttttgggtggattgttatttgtatcgattgcctctgccggctataaaagtaatgcacaccgtgacttttactcaaaatgcgtagccgctggacatagtcgcgcgacctgtctgtgtatttatcaccgtttagaacgccaatattccccaaaactcatgcataagcttggaaagttaagtctacaaagcccagaagtgccgcgtgattttgtaaaaaccatgcttcgaacgatgcaacagtgccagtcataaagttacaagtttttttaaagcaaatcagcaagatttctaatttcttccatcaccgctttacacgcaggcgttaaatagccatgtttagaaatagacaaagaaatatagcgcttgagtgctgggttaataatttttgcggcttgaattgaggtgtattggctggctttttttaaagcttgcggccccagcatggtatacatgcgagactcggaaaccaaatgggtttgtaaactaatcgaatcggcttcaaacacaatattcagctctaccccattttcataggccatgtggtctaaaaaattgcgccagttacttggcctgcaaaacgtgaccagcggtaactgacttatctctttaaagtcgacttcactggcctgagtgagcgcatctccttcgctgccgaccaaataggtatcggcttggataaggtaaatatcgccttgtttaggtgtcgggttaaagcgataaagaatagctaaatcaacactgccatcttcgagccatttttctaaatgtaccccttgcccttcacgcactgaaagtttaattaagggatatttttgttgaaggactttatagagagtcgataacaacggatgtgcagtagacggcaaactggcaatacgaaccgtaccaatcggtgtatcggtcgagtgcaaaatttcattattgagttgatcggtcacgttcagccatgaacgaattttaggaagtaaatgctggcctaaatcggtcagctcgacaccacgtccagttcggttaaacaaacgaccaccacattgggcttcaagctcattcatttgccgactgatttgcggttggttggtgttatgcagcatggcgactttgcttaagctaccgagttccaccgcgtctaaaaatattttccataattcataattcatcgattcttcccaaatcgtaaataggcagcattttgagccatacattttcagtataactgaaattcaagaattggtaattcctacatagctcacctatttctatactccaatcatgttctctacaacacgatttaagtcagattaagaaccagagaatatttaattacactgtataggaagtacgattatgagtttagatttacgtggattaaccccagcacctgtgactccttttacccgtgacggacaagtagaccatgatgcaattcaacgtttaggttcatggttaggcagtattgatggtgtgaaaggcttggttgttcttgggcatgcaggtgaaggaacattcttgtctcaaaaagaacaaatgcaggtcatcgaaagctttgttaaatcggtagatgataaaattccggtaatcgcagggattacactcgaaggtacttcggttgcagcagaagaagcaaaacgtgcagtcagcgcaggtgcttcggcaggtttgatttacccttcacatggctggttgcgttttggctatcaaaaaggcgcaccgcaagaccgctataaagcgatttatgaagaaagtggtttgccatctattttattccaatatccagatgccactaaggccacttacgacctagacactttactcgatatttctgcacagccaggtgtgtttgccatgaaaaatggtgtacgtaacatgcgccgttgggatgtcgaaattccaattattcgccgtgaacgtccagacttacaggtgttgacttgccatgatgaatatttgcttcacaccatgtttgatgtagacggcgctttggttggctatggcaacattgcccctgaacttttaattgaaatgattaaagcaggcaaagccaaagattacgctaaagcacgtgcaattcacgaccaattattaccagtaactcgcaatgtttatcaccgcggttcacacatggaaggtacggtcgcacttaaacatgcactggttgctcgcggaattttggaccatgccactgtccgttcgccactgcttccactggcagatggtgctgagcaagaaattcatgatgcaatgcgccaagccggaattggcaaggtcgatttaacccaagccgttgcttaaattctattcgggctagcatatacgctagcctttttttcctgtacgctgcctgaggccaaacatcgggcatgtctcttaaaaacaataataaaaagcatgcaaactgttgtgaacaggtagtgcgaaatagaacaacaaaactacgaggaatgtagtgataaggagatataagatgacaaatctagcggatgtagaacaaattagtcatcatcaaaaaaatgcggaaattattgcaagactcgaacgactacccgtcaccggacgattgcaatttatgcgaattaccattggtatcgcgaccttttttgacgcttatactgttctagcaattgcctttgctttaccccaactcattaccgaatggcacctaacgcctgcctatgtcggcgcgatcattgccgcgggctatgtcggccaactggttggtgcgatcttttttggttctcttgccgaaaaagttggtcgtttaaaagtgctgtcttttaccattttactgtttgtagcaatggacatttcctgtctgtttgcgtggagcggaatgtcgctgttaattttccgtttcttacaaggtgtgggaacaggcggcgaagtacctgttgcgagtgcctatattaatgagtttattggtgcagaaaagcgcggtaagtttttcttgctctatgaagttttattcccacttggtcttatgtttgcaggcatggcggcattttttctgatgccaatttacggctggaaagtcatgtttattgtgggcctaattccctctttactagtcattcctttacggtttttcttgcctgagtcaccacgctggctggcttcaaaaggccgctttaaagaagccgatcaagtggttaaaagctttgaagatggtgccattaaaagcggtaaaactttggctgaacctgtggttaaagaaattaacccgcaaggcatggcaaaaaccgactggcgcgagctgttccgtggcatctaccgcaaacgtacctttaccctgtggggcatgtggttttgcgtgtatatggtgaacaacgccatggtgacttggctgccatctctctacaaacaacactttggtctgtcgctgcaaaccagtttaggttatggctggattacgtcgggcgtgggtgtgattgcctctataatctgtgcattaatgattgataaagtcggccgccgtccttggtacagtgcagcgtttttcttagcaatcattccactcatgagcctctcggttttaggcgcaaaatcggccatgcaagttgtgattttagcaacgctgagctatgccattttgcagaccatttcattctctttatacctttacgctgctgaactttaccctactcgcctacgtgcgatgggcatcgggtttagtaccgcttggttacgcgctggctctgcaattggacctgttatggttggtctggttgttggtggctatggcattcaatatgtgtttagtgtgcttgccgttgtggcgctcattggtggccttgtgactttcttgtttgccattgaaaccaaaggccaagtgctcgaaaaactctctccttaattcatccatttcataaaaagcttgcctaacccagcgttaggcaaagggcttattcatacttaaaaaaggaatttaaaatgaataaatatttgctgtggggctgtattggtttaggcagtgtgagcaatgcgtatgcagagcttcctcaagaatttggcaagttagaattaaaactcaacacccgttattggaacgatgaaggcactgcccaccccacgctcgccaacccttcgccttcgtcgagtgaatatgaacaaagtgccttagggcttgagttaaattatcagtcaccatacatgtgggactggcttggggtggatggttcactctatgcagtcaccaagttgtttgactccggcaagccgagtgctcagcttttagaggtcgaaaataacggcaagctcgaccaaaactttgcgacttttggacagctctatatcaaggcaaaactgggtgatcaaggcgaaattaaattaggccgccagttgcaagactcgctgttacttaaaagcaccaataaccgcgcagtgcccgacactttttcgggtgcgagtgggcagtttcaactaaatgatcagctacagacttacattgcttactatgaccgctggaaaccgcgcagcatggattcttttgaaaaactggtgactgaaaatgacgagcgcattgattatgtcggtttgcttggcgccaaatatcagtacaaaaactggagcgtgaatgccgaatatttaaatagcaaagattatttaaaaaagtacggggcgattgctcaatataaattgccgatgcatggcttggtgtggacatttaacacgggtgcttttttctcgcgtgatgatggcaagctgtttaaatgcggtgccgaaaccgagctggactgtgtcaaaggtcaagacattaacaaccgtggcaatggttactttgtcgatgtaaatgtagccaaaaataatattgaaggtggtattgccatttccaagtttgatggtttttggattgaagataactttgccgtgcactccgaccgcaactcggttttaacgcaagaccacggcactaacccgtttccgacctctgcgaccattggccctgactttaccaataatgatgaaaccgccgttgcccttcgcctgaaatataactggaaagactacgtgaaaggcttaaaaaccgaagcgaagtatatttatggttttggcgctcaccaaagtaatatcagcagtgatattgaaggtaaagagcgttactttgactttacggtaagttatgccttgccgtgggtaaaaaacttagatgtgcgttattcatttttgcattatgagtcaaagtttgaaaatgcaaacctaggtgaaaaaataaatggtatgtctcggaaatattgggaccagcaccgtgtatttattaattaccgttatacattttaagcacaagctaaacgtttagtttagctttattatttttattaatttatagctttagagatattaacttttgagtttaattaaaatataaatttatatttaaaatttttataatattttatttaaattgaattgacctattaaaaacttatgattattatggtctcgctggcctacattgccagtcggttttgacagaccgagtatacagcgtatcaggtacattctctcctgagtatgagacttgtgcgcaacccgcactcccccttaccgttgaggtaggacgggagggggacgcgcttgcgcgtgctggcttgtatgcccagtctgtcaaccctcttccgttctaccaccataatcaattgacggtgatctttggtggtagaactccatatattttaaggagttgaccatgccacgatatatatttatcccctctcccttataaactttttatttatttaaaatttagttttctattatctaaattttcaaatttataaattatttttattttaaaatttaaatcattttattttattgcttttataggcgggttaactattgcctttaaaaatgattttaaaacttaaaatatagcggtttattttttctcattgagatatccccaaatcatcacgagaataatatgaaattttataaaactattttggttttaggcctcgttgtcggcgattacagcgtttcgggttgtgacctccgcacacagcaggaatttgaaaaaatttgcctgtcgggtgggcacactcaagccagttgcgactgtatttaccaacggctcgaacaagtgtattcacctcagcttatgcaacgtctagaacatgtcagtttgcaaagtcctgctctcccacaggactttgcccctactttttttagtgtgatgcggcggtgcgataaaaacgacatgggctaagtgtttggcttagctcccttatctctgtgtcgcaatggtggatgactttaaatcagcgcaaaaaattaaagttctgttgtggcacgggggccttggggggaaatgatttcattacttccttttctaaagattagttcctaccatttgtcttgaagtatctatgttaatcaaaaaatttagtctattctttttacatagaaagaatgctcaaaaaaattaatcagttgatttaaaaaaaattgttcatctaaaatttagtatttctaagcgagccattcctatgtcaattgaagatttctttataaaagattctccctctaagagatatcttttaatgagcttagccctattcatgtcaataatggctttaattgcttactttaagggaaagttgggatttgaatatatattttcccttactgtagggtacgccttaatattttttattttaaaaaatgcagcattaccactttttcccccacttacggaaaaaagtagtgatgcaaatgctatggctagaacaaccatagcaattgtttatatccttgctttgatagctctaactatttcttattctttataattaattactcttcaattttcttgcttcgctctacagtaatatattcatttggaattactaactgcttttcaatatctttcagcttataagaaactaaagtgcttttaccaatgccttgaaataacactttaacatctttaaaaataaaggttttatactgactcagttccttagttgttgttcttggcaattcaattaaatttgcatacggttctttaatatataaggttgccttttctattcgtaccccagtattttgcatagtgtaatttaggaatgctttaccaacatcaccaataaggataaggggcacaagtggagtcaagctaataaaaaaagctatttctaagctatctctaatatgcgtttctaatctctttaatttttttcttgcgaatgctttaagattttcactagcatcaggatcatcaacaatatctgctagattttcaaattttatattaaattctttaatcttctgccgattcatgtaaaaaggataatacgcaaaggcgataaaaaatacggtaattcctatgtataaattgactttccaatgcaataaaaatatgccgtgaataacgtataaaagataaagagagccaattaacgtaataatattaatttttggaaaaggaagttttttcccaattctaatatgaggtggtaaatacttatcaacccagcttaagacaagataggtcactggagctaaggatgtgccaaagaaaaatagcataaaccctaatacagcgtaagcaatagagaacgcagcaaaaatcagtagaaaaataagtgtatcaccaaagctaatttccgacgggatatagccaattgttaaaagataagcaactaagcacaacacccctattgcaactatcgctttagtcattgtcagtgcaacttcatgccactgccccagattatttacacatctcgttatcaagtcgttcatttgatctaaccaaattttataaattatttagaaagagataattacctttttcataaaccgctccccagcggagtaatcgtcttttgaaatttccccaaatttcagagtatgtccccacatactattcagtaatgtcacaaaaaacttatacgttttcaggccatgtattttagcttgtattgcactagtttctactttaaacccatacaaaattaaagttctattgtgatataactgcttgaaaagaataaatggaacaaatacttaaagtatattatggaaatttatttctcaaatttacagatattaagcatttcaaaagtaattaataattctacaaactttcataattacaaatagataaaaataaaaaaatcataccaagctggtctaaatagcagaaaaaaggtcatattcttgaggattttttagtccatcacaaaaaaacattacttctttagctttaattctatgataagcgctataatttaaatcataatcagtcatttgataatttttataaatctcttttatctcatcacaattatcataagaaacgatccatttagatttaattttatctaaagcttctcttattttgacatgatcctcatgaacatagaaatttcgataaaggccttgcccttttacataataaggaggatctaagtaaactaatgaattatcaggtaaaaattcatcaactttctggatcagcatcaaagcatcttcattataaacgtgaattcgggaggcatttgctccaactttttcaatacgtttacttagatttgctttattaaatctagcatcaagggtgtaattaccatcttgcttcttccctccaattacaccacctttaaggatacctgacctatttgtcctattcagaaaaaatgctgcaaaacctttaagtaaatgatcggtacaagaccaatcatttaagatatatttctgtttatgccattcatcaatagttattggtgaatcatgaagtaatttcaaaaaatcatcagtatgttcagttatagatttccagaaactatatacagctatatcaatatcattgatatgtatatctgaaacgaatccactataaagtaaatcaagtgcaacacccgccccacctgcataaggctcaagataatgaccaccttttaatccattaaagttaaaaatagatttcacaacaggagcaaattttccctttcctcctgggtatcttaaaggcgtaaaaaaggtatcaacactcattacttaacaactagatcttttatgcaattctatcatctatacacgcctttaaacacttagatatttacttaatttttaagaagtcttttatactatctttcatagtaggatgattggtacttatcacgtataaaagagttttcttaaaatcttcctgaaaagtattatatttctcaggattataatcaatcatgactctgaaaggattatcactaatctttcctttgattagagattgaataatttcatttttatagaaatttttaaatttttctctcgctttccctcctgactcactactcgaagctcttttctctaaaatgatagtttctaagtcataattttccgtaggagtttggtcaagattaaaaaattccaatattggagaggctattcttaaaaatactggtttagaaaagctaattttattatttttccaatacatatcatcggcaggtaatctataaagaaaatcaaataagagttgatctggaggtagggttcctggaagacaaagagtgtttttgaatttatttccttctttctcgtccccatcaaaaataataatgctatttcttgaaaattcagcaacatttctttttatcaaatccatataacttttacatccaagagtaatttctttcattggatcgataattttattaatatttctttctctaataagagctttaaagaattcataagcctcatcatcttcataataaatgtttgttttaggtatttttttttctacatcaaattgaattgtatcaataaacaaatctgcataaattttatcccaagaataattttcagctacttcaacacctccataagtatcagttaagtaaatagttttattattagatttatcatatttagatttttcaaaaatattttgaattactatcggagaatgagttgtaaaaattatctgtaaattcaatctcttagcaaaactttctagaatttttattaattctacttgtgcagctggaaataagcctgcatcaatttcatcaatcaggagaattccaccatgataatcaacatattcttcttttaatttttgaaatgaaaaaagagccattaagatttgaccagtattatcctctccaaccgaaacagactcatgatcataattatttccatgaactacagcagattcgattgtaccagtcgtttttgatacagtagttccactaattttccctaacaagcgattattagtgatagtgaactctctagaaattcttgtaaaatattctacctcttctgaattaagactatatttacttctctccgcaattggcattaatctttttaaacttagataaataagaggatgagtaacgtttctgctcgagttgtcctcagcatcaacttttaaattatctcttacaactggtcttgattgaggcctatcttcagaaccataaagacgtaattttaaatctggaattatttttttaaaatatgcatcaaagatttcaaactctacatccatagtaccaggtaagtcataagtttttgaaaatctaaaatgttctctaaaactcgatttaaaattcttaccagccaatgtcttaaaattaatatcactaccatcaaaatgatttttatcaaaattaaaaatttgcgcaatcattcctaaaattgttgattttgaagtaccattttttccacaaataactgttaatctatcgccaagatttatctcaatattctttaatccacgaaaatgattaacttttatttttttcaattgagttatatttgaagtcatagtgcaatattagagttacaaacctaacacaatgtaacaaacagtaattaaaaatggaatactaaacaccttagtcaatatataactattcgtcttagtcaccaattatttaataagtatttctaattattatagctaatagctaattttttttaattaattctttgatttaaattatttagattgggtctttaaaatgcttacaactataccctgtaaaagcttgaagtaataaattttaattatcaataattaagctgaatcaagaatggttaaatttaaggaattaaaaaaggcttaaacctcttagatttaagcctttccgctttatacgacatgatattcacttatataaagcttatgtatttggtggagatggcgggagttgaacccgcgtccgccagcactacgctcgagaatactacatgcttagatatcgtctattgttttaacaccaagtgacccgacgaacagggtacaaggtgcgatcctctaagtttggtataaagccccgaggcttgactctatacggacttgtgtgcgtgcgcttcagtcgggttcccagaccacaagtattctaggaagcggacaagcggcccttaggcagctagagcgtaagtttcgtcgtttgcgactatttaaatgcaaattttatttacgagagaaaatgcgctctcggcatgcatctatgagtttcatcaccggcgtcgaagccaataacatccccatgaatgtctgcacatcatagcataattaaaataaaatgctgtgcattttatcaacagtctgccactgatgaacatacttacataattgagtgccttttgtttttttcaaggcccctcataaaaaaagctgccaaaaatgacagcttttttttatgttgggtctataaagcaccattgcctaacacaatcccttcacggcgtgggtctaccccacctgcgtatttactttgattatttatatttactttcataatcgttgaaataccactggtttgcgcagtgttagaaatgccatgcccttttgcttttaagccttcaattaggtcaactaaggaaagctgtacattcgagctatcaatattggtatttttgctattggttgcgccaaagttaacaagcgaagtggcctgctgtgcatttaagttccagtccaatgcacccaccaaggttttaactacatattgaatgatggtaccgccacctggtgagcctgttgccatataaaactcatctggcgtggtgcctttaaatactaaggttggcgccatagtactacgtgggcgtttgccgccttctacacggttggcaactggtgccccagtgctgtcataagggttcgcgctaaagtcagttaactggttcgacagcaagaaaccatccaccatgtggaatgaacccatgctcgattcaacagtcgatgtcattgaaaccacattgccataggcatctacaatcgtgaactgagtcgtgccatgttcaacagtggtatctacacctgccgctgtattgaaattacctgccggtgctacgcccatactttggttcgggttaatcagtgctgcacgctgcttcaagtagtttttatcaataaaacttggaataccctgtgccggcaaacgaacaaagtcggtatctgccacatatttatcacggtcggcgtaggccaaacgctctgcttcagacactaaatgcacgcccatgacatcgggcacaccgccttcattttcagggtttttaggtgggtaaagcgacatatcaaagttttctaaaatacccaacgtctgtgcaaccgcaatccctcccgaagatggaggtggcatggtacatacatagtaacggtcacggtacgtcgtacaaatcgggtcgcgttttttcacctgatagttcgataaatcctgcaaggtcatcaaacttggggtaattggagtttttgctgggtcgtcacccacggtttgccctgcttttgccacaatcgcttgcgcaattggaccagtgtgtagtgcgtttgccccttgtgaagcgagtgcttcgagtgttctggcataggctttattggtcatggtctcgccgactttacgtggtgatccatctgggtagaaataagtcgccattgcatttgcatcgagtgctaaattgcttgcattacttgcaatggcatctgccaaacgccccggtatacggaaaccgttgtcagccaaaccaatggcttcaccaaaaagctgtttccattcaagcttgccatgttctttttgggcttgttccaataaacgcatcacccccggcacaccaatcgagcgaccgctacggcgggcatttggtacaggtggaggtgaatttgggtcatatatattttggcgaattaaataaaattcgttggctgccgctggtgcggtttcacggccatcataagccgtgacttgtttggttttggcatcgtaatacatcataaaaccactaccggcaatggtactcgactgtggctcgaccaaaccaagcacggcttgtactgctacggctgcatcgactgcactaccgcctgcttttaaaacatcacaacctgcttttaccgcaagtggcgtgtttgccaccaccatatatttatctgcgtatttaaccgtgttaccgagtctataacccgatgcaccctcgggcgcggctgggtcaccattttggtttgaaccgaccaccacacttgaaccgtcttgggccagtttgctacaactggtcgggtcattatctacaattaaattgggtggggttgtatttgaatcatccttgggctgatctgacgaggagtcatctccacatccttgtaataaaccgactgctaataaactactgaacaaaaatgaatatcttttattcacgtgataactccaatatatacgcctgcctatccatgcaattgccatgcaagcttctttgttttcaggtcttcagtttttaatctttgataaaaataaagttttaataatattaaatgattaagggtgttgattttgtactctgtgtgatgtctccttgtttgttatcacactcttttataactgatttgcccaattctggcatgctttatttctttaaatacaagcaaaatttcctatttataaactcgctcattttgtagtaggcctaaaaaaagcacctccgaagagatgctttttgatgtttagtgagaaggcataccgctaacctgttttggttttggacacagccaaatgaccagccccgcaaagacaaacacgatcgcaaacagtaaaaacacatggtttgccgacatggtaatggcttctttatcgacaaggtttgaaataatgcctaaagtcgagtcagccgtaaaaccattttgcaaaagtgtgttttgtacttcagtggtatgtaggtttgacaccatttcactacgggcaactttggcgtggtcgtcccacacggtcaccgcaattgaagcgccaatcgcccctgccatggttcttaagaagttcatgaggcccgcagcagatgcaatttcttgctgcaacaccgaacccagtgcaatgttagacagtgggataaagaagaacggtactgcaaaaccttgcaggatttgcggccaagccagtgccataaagtcggcatctgtggtccagaatgcccgcattaaggtcacaatacccagcaaaattaaaccaaagctcgccagcgcacgcgggtcatgtttggtcgaaagttttgccacaatcggtgacatggtcaaactaccaaagcccatggttgcagttaaatatccggcccacgtcgcggtataggaaaggttcatttgcagccactgcggtatcagtacaatactgccaaagaatgcaccaaagccgagcgacaaggccagtaccgaaatggcaaagcccctatgcctaaagactttgacatccaccacggggtgcttatcggtgagttcccatatcaggaacaccacaaagccaatggcggcagttaaagctaaaaccacaatgctggtgctgttaaaccagtcgcgttcatgccccaagtcgagcataagctgtaatgcaccaatccacagaattaatagacctaaaccaacagtgtcgattcttaaagaaatggtttctgtttcagctactcttaacaagcgcattgctgctaatacacagacaataccaaccggtaagttaataaagaagatccagtgccaagacaggttatcactaatcagaccacccaaaattggtcctagaattggtccaacgactgtggtcattgcccataggcccattgcctgcgcatgcttttcttgagggaaaatacgcataagcaaggtttggctaagtggcataagtggaccaccacaaaggccctgcccaatacggaaaaacaccaacatttctaacgatgttgccaaaccgcataggaaagaaaagaccgtaaagccaattaaaccaaagataaagacccgcaccgttccaaagcggcctgccagccaacctgttaaaggtacacaaatcgcttctgcaactgcatatgaagtaacgacccatgtgccttgtgtgcttgaaacagcaaggttaccggtaatatgcggtacagagacgttggcaatggtcgtatcaagtacgaccataaagttcgacaaggcaataacaaacgctgccagtagtaaacggccaccgcttaactcggcaaaaggtgtttgcgttttcataagcgtttacttcgcagataagtcgacttttgcttccatcgacaagccaacacgtaatgggtgttcagcaagttctttcgggtcaagtgcaatacgaaccggtaagcgttgaaccactttaatccagttacctgttgcgttttgagccggaattaaggcaaaggcagagcctgtaccaccagagaagcccaccactttgccgtggtattcaacatcatcaccatataaatctgacgttaatgtgactggctgacctgggcggacttttttcaactgactttctttgaagttagcatctacatataaatcgttaagtggcacaatcatcatcatgcttgtacccggtgcaacgcgttgacccacttgaatattacggcgtgtaatcacaccatcaactggtgcacgaatcacggtacgttccaagtcaagctgagcttgttctacatgcgcttgtgcaacttgtacatccggagtcgaggtttcgcttacaccctgaattaacgcttcgtttgcagctaaggtgctttcggctgccttacgactagaagtcgcttgtgcaaggccggctttagcaagctctagccctgctttagcagtttcaaccgcactttgtgctttggtgagttcttctttagacacggcgccagaggcagcaagctgtgcacggcggttcagttctaaagcagctttgtcatagtcggcctgtgcttgagcaacctgtgctttagcactgttaatttcgtcagcacgaaccaccacttgagagtttaaagaactactgtttgccgcagtttgtttatattggcgttttgctttggcaagctctgcctcggcttgtgccaacgcgattttggcatcacgatcatcaatacgaaccagcacatcaccgcggtgtactgtttgagtatcttttaccaaaacctgagcgacctgtccgctaaccattgaggtaatttgcgcggtttctgcaccgacataagcattatccgtactcaccgagtgatttaaaaataatgcccagattgcatataaaatagcggcgatcaataaaatcagcgcaaagaaaccaagaaattttttgcgcttgttttgcatgttgtcatccgaggcagatgttgttggcactgtttcttgtacattgctttgtgcatcagtcatggtatgttcctaaagatgagttggctttgccatcaatctcgcactacaccttgttatagagtttttatttttctataaacaagacataccgcattgtcaaaggagacaattttaacgctaaaacctcatgatatgagaataaaaaaatataactaatgcgttcgttctaattaaattaatgtttatctcaaagtttttgtgaaatttttatcttttttaatatgaaaaaaagcgccctgagcgctttttaaatgcttaaaatgcctagattaataggcatatgaggcaataccggcagcaatggctttatcttcatcattgaccatggtcatgcgcatggtacagcccttacggcctaaacgtaggacttcggcacgtgcaataaaatatttaccacgccccggtgccaaataatctacacgcatatcgacagttgccaagcgtgtaacctgtttaatggtttcaggcagggtttcgggggttgaacggcgatagagatgttccattgccacaattccaccaatgctatcgagcaaagttgcagccacaccaccatgcaaaacctgaaaagccaaattgccaatgaggtcaggttgcatttcaacatagccttcaatgtgcccatctaccacacgcataatcattccactatgcttaaaaaatggacagctattaaacgccttacacaattggttgagaaccacatttaggtcggtttttgcgcctaattgtatgttccccgtccaatttttcttttcatcactcatacgttgcctaaatttaaaagcatgataaacacccataattttgtacaaatccagcattatggggctacaatacagcagtcggttgacagtaatggaatatccgccaacctatcctagtgtaataccgaacatcgagattgttatgacttatacgttcaatcgtcctgcatttccagctactcgcatgcgccgtatccgtaaaaatgaccagttgcgtgcgatggtcagcgaaacacagctcactaccaatcacttgatttatccagtatttgtattaccgggacaaaatcaaacccaagatattccaagtatgccaaacattcagcgtttgtcggcagatttattactgaaaaaagctgaaagacttctggaattaggtgtatccaaactggctcttttccctgtaacacctcaagaagataaaagccttaccgcagaagctgcatggcgtgaagatggtttagttcaaaccacctgccgtttgcttaaaaaagaattgccagaaatggtgttaatcaccgatggtgccctcgacccatacacgactcatggtcaagacggcattattgatgaaactggctatgtgctcaatgacgagactgtagaatgcttgattaaacaagcattaagtcacgctgaagctggtgccgaagtgattgcaccaagtgacatgatggatggccgtattggcgcgattcgtcaggctttagaagccaatggtcacatctataccaacatcatggcctactctgcgaaatatgcgtctagcttctatggtccgttccgcgatgctgttggctctgcatccaacctcaaaggtggtaataaatataactaccagatggattttgccaaccgtgccgaagcattacatgaaatcgcgcttgatattcaagaaggcgccgacatggtgattgtaaaaccgggcatgccatatctggatgtggtacgtgaagtgaaagatacctttggtattccgacattcatttaccaagtgagtggcgaatacgcaatgttagctggcgcaattcaaaatggctggttatcagactcagtgattttagaatcgctcatgtgctgccgccgcgctggtgcagacggaatctggacttactttgcagaaaccgctgctgaaaaactcaaggaaatgaactaagttcgcagagaaaggataacactgcatgcatattgcaatcattggcgcgggcataagtggattaatgtctgcgctggagttggttgaacaaggctgtaccatcagcatttttgatcaacaacaagcgggacaagcagcctcttgggctggtggaggcattctctctccgatgtacccgtggcgctatgtgcatgcagtgaaccaacttgcccaatttggcaaagcctcttatcaagcatggaaccaaaagctctaccctgttacaggaattgattttgaaattcatgacacaggcatgctgatttttgatgaagaagattttgacgtcgggctttcctacgccgagcagcatcaagaaccgatgcagcgctgtgaatatttacaaagagatgccttagaacaagttaatccgcatatttccgaacaatttcaagaagccatttacttccctgaactgtctaatattcgcaatccacgtgtattacagtccctgattagctatttaaaacaacatccaaatgttgagttttttgaaaacactcctgttaaaaaactgattcaacaaggtgatgccatacaagcactccaaaccgaagatggtcgcaaacatacagcagaccattttgtaataacttcaggcgcttggagtcattattggaactcacaattacaactcgacattccagtcgaacctgtgcaaggtcagatgctgttatttaaaacccctgctcactggctaccgaccatgtgtatgaatcgagtcatgtatttgattccacgtatggacggtcatatcgtgtgcggttctagcatggcacatcgtggttttgacacctctaccgatgaaactacgcagcacaatattttagaagcgtgtttagaaatggtacctgaactggccgatttcccgattgtacatcgctgggcaggactcagaccaagttcaccaaatggcgttccgtacattggcaaaatgcctgaaatggataacctgtgggcaaactttggtcactttagaaatggtttgtgtatgggcgcaggttctgcgcaattgcttcgtcagcttatgctaggtcaaccagccttagttgatgccaaagcatattcaccagagcgcttgcaaaataaaatcttagcctgaggcgagtatattttctaaagccatttttaattgaggataagcaaactcaaatccttctgcttgtaaggctgcgggtttgacgtattgcccatttaagatcaattgcgactgctctcctaacaaacagcgaaaaactgtactaggcgccgacaacattggtttcttattcaaaactttggcagcttgttcaacaaataccttttgggtcacattttctggcgccaccacattatgaatttgagctgattgaggatgctgaaatataaactcaattgcgtttaatacgtcttcaatatgtacccaaaccacaggttgacggccatgaccaatttgaccgactaaattgagtcgaataggaagcaacattttaggcaagatgccgccaccctgcccaaacacaacgcctaaacgaataattttagtattttgctgaggatctgctaacgctgcgagttcccactcttggcaaagctgagacataaaaataggctgtggcgaactttgttcagtgcacacctctgcccatttttcttgagcatctattccgtaataaccaattgcagaaccagacacaattacttccggaaaaatttgagattgcttgagccatacatacaattttcgggtcgtatttacacggcttttaatgagttgttttttacgtgactcggtccagcgtttctcaccaatatttgcaccggccaaattcaccacataatcaatttgacggatcgaaatatcttcgaacttttgtacccactgcaaggcaggatggtcagatttctttccagcctgccgtgtcacagcaatcacgttataatttttttgtagcaggaacctaattaaatgcgttccaataaagccactggcacctgtgattaatacattcttattcatatttcctccaaaaccgaggacagcagttttttaattaatatagttataaaatttaataacgatctaatcgtatcagtttttgtggtgagttatgacacattaaacattttgtttgccatacgctgtgcctgttttccataaaaccagtaggtaattaaataaagcggaatagctaacattaaaagcataatcaccataatgcttaagaactgaggctgtttgaggtaaagcataaagttttgcaaaatctcagggtcttttcttgaaaataaaaacagaccaaataaaacaccacacaagttatagccccaaaatatgagggtaaaacctaaagtaaatttctttttttctggtactgtcggtgcacggcgttctttctttaaaaatctaaataagacaaaaatcattgcgcctaaatatggaacggctgttaaaataccgcctacactcgctggtaatagtgctgcaatcacaccgacaattaaagtaagcacgatgcataaagcaaaaaaccagagaaagtaagaacgtaatttggtcatatttttgcctaatttatgggtttaaaaaataattataaatttttttcgattttttttcatttttctgtcaaccaatcctgatctcttgacgttatatagggtaacaaggtcgcagcaaccgaatacttcctttgcacggcatccgcaaaattgtttcggtgacctttcattacgactctttcttccttcggattaggttttgttagcagccgaaacccttgatgaagtttttgaccgacgattctctcatcactcgaatcgtcggtttttattttctagtactttcatttattttacgctcaccatacacaatagtgctttcgtggctataaaggctatgcgtatactttttacaccataaaaatatgatttaaataatatgaacaatattgcctattttgaaatccagtcttcaaaccctgcccgcgatgcgcagttttatcaagctgtgtttggttggcaatttaaactcgatgaaagcttacctattgaatattaccgcatagaaacaccttcgattatgggtggactattaaaacgccctgctcaaacaccgccaatggaatatggcaccaatgcatttacctgttcggttcaggtggaaaacttcgatgaagtggctgcaaaaattttagcgcaaggtggcattgtggcaatggataaattcgctattccgggccgcgcttggcatggttactttgtcgatttagaccacaacgtttttggtatttttcaagtcgatgaaaatgcaacttaaagattttatttagcctatttattttaatttatagccaccgcttttatcggtggctatttcatatgaattattcagcaaagctaaagctggcttcacatgtaattggaaaatttaccgaattggcaatcatacattcatgatgtgcttcttcatgcagttttgctgcaagctcttggtcagcacctttttctaaaacaacctcgggccttaaaataatttgggtaaaatgaccacgtttgaccggatctgtatcttccataaatcccagtgcatgatcgatataactcacaacgtgaatatggttgactgcacataggtgcaaataccaaagcttatgacaagctgaagctgacgcgaccaataaatcttctgggttccatctggtcacatcgcctaaataggtagggtctgatgaaccttgaatagtggtcttttgaggatgctgaatactaaagtctcgtttatatgaacgataagatgaagtgcctgtacccgtattgccttcccactgtatttttacttcgtatttatgaatagccattttgttctcaaagttcatggtttgacctgatagtaacaaagcagagcttaaggagacaaaataattcagatttcattgctggcttaaataacgaacactttaaaatgtcttgataaaatctcctgccaatttatgctaacgtatctgtgtttatcttggcttgatgtctgtttctatgtccgtacattttctacatacttctgactggcatttggggcagtttttttataatcactcacgacactacgaacaccaacaatttttaagctggttgctcactcaaattcaagaaaaacaaccacatgccctgcttattgctggcgatatttttgatgtcattaacccgggttcacaagcacaaaaacaactctaccaatttttagcagatgcccatcgtattgcaccgcacatgcaaacactcatgattgcgggtaaccatgactcaggctaccgtattgaacaggttgaaccgcttttagaaaaatacaatgcaaaaaccgtaggtgtggttcgctggaatgaagataaaaccctagacctcgatcgactgcttttacctatttataatcaaaatcaagatattgtggcgtggtgccttgccctgccttttttacgttcggctgaaattactggctttaacgaacataccaccaatagcaaaaatgcgattgcctatttgcaccagcaactcattgccgaagccaaacgtcgcaagacaccggaccaagcgcttattttgatgtcgcatgcacatatgcaaggtggagaaacatctgactctgaacgtccaattattattggtaatgaagaggcactttcgacgactttatttgaagatgctgtcgactatgtcgctttaggacatctacataaaccacaaaaagtaggtcagccacacattcgttatagcggttcacccattccgctttcttttagcgaaattaactataaacaccaagtagttgaggtcaaaatcgacccttctcaagacactgacagccgtttgcaatttgaagctgtcgaaattccgcgttgcatacaattgcaccgcattcgtggtgagctaaacgaagtgctgcaacaactcaaagccttgcctcacggtgtgattgaaaatattgaccaccgtgaatatgtcgatattgaatattatagtttaacgccgccacagccaaatttacgtcagcagtttgaagcagctctgccacctgaccgctatcgtttagtgcgtatttcacgtcaatacgtgaacaaagacacgactaattcaaatactacccagcacattgctcttgagccaccaacaccagaaaaactctttcaaaatatttgggaaaaacaaggttacagcgccgatgatgcggtcttaaaagattttctgagtctggtacaagaagcacaaaaacatcttgaaaatgatgcaagccattaaggatatgtcatgaaaattttatccattcgaataaaaaatctggcatcgcttgctgatgaacattttattgactttgaaagcgcacctctggcccatgcaggtctcattgcaattgtggggaaaactggcgcaggtaaatcgaccattttagatgccatgtgtctggctttgtttaatcgggttcctcgccttaaagacagtgatggtaagttaaaagatgttgatggttccgagttactgaccaattcgcctttaactgttttacgccgtggtacaggacatggttttgctgagctttgctttattgcgcaagatcaaaagcgctatttggctcgttgggaaattaaacgtgcacgtgaaaacccaaatggtaaattgcaaagtgtgcagcgccacttaaaatgcttgaccgctggtgtcgtgcttgccgacaaagccaaagcagttgatgaaaaagttaaacaaattacccagctttcatttgagcagtttactcgtgctgtattacttgcccagtcagaagtcactgcatttttaaaagctcgagacagtgaacgtggtgaattacttgagtacctgaccaactccagcattttcgccaaaatcggtgaactggcttttcgtaaaacagctgatattgcaaagcagcgtaaacagctggaagagttcttaggccatattgaaattttgtctgatgaagagattgctgcatttaccgagcaataccagcaagccgaacaaaactatcaacagttagaacagcaaaaacatgtcttagacaaacagcaacaatggtttgaacgcaaagcaaaacttgagcaagaagttcaagcgaaacagcaacagtttcaaacccagcaaaatcaccatcaacaactggctagtgaacgtgagcaattaaaacgactcgaaattttctctgaaatacgcccacaagtttttcagcaagctcaaaatttacagaccctacaacaacttgagccgcaaattcagcaagctcaaaccaagtttaatgagttggtgcaaatttttgaaacgggacaaaaacaatatcaacttgcagaacaacagctcaaacaaacactcgattttgagcaacagcatcaacatgctttaaatcaagttcgacagtccattcaagaacgcgcttttattgccgatgaatataaaaagtgcaaagaaaaaagacaggtacttgagcaaaacctaagcccactacaacagcagcgaaacgctgtacaacagcatattgcacagcttgagcagaacaaaattcatctacaacagcagctgatccagactcagcaatatgctgcattagataagggcctttcagcacatctacatcagcttgggcaatttattcaaaactatgaagcgattgaacaacagattggaaaccctacccttgctcgccaaaagctatcggaagctaaaagtgaacttgaacaactcacagtttcactaggcaccgttgaacagattgagttaaagcttgaacaacagcgtaaagataaagatcagaaacttgctcaagtcacgcagttagatctgattcaacagaaaataaaaatttatcatgagctatatgctgagcttcagcaattcaccgaaaaacatactcaagcctccgcgcaagaagagcagcttaaaaccgtttgccagttagctgaacaagactaccaaacagcaaaaactgaacgtgaaaagttacagcacatcctgcaacagcaacgtttactacacaccgaaaatattgaacagttacgtgccaatcttaaagaaggtgaagcgtgtttggtctgtggaagcacccatcacccttatcgtattgatgacagtgcgatatccaaggccttgttcgatttgcagcaacagcaagagcaacaagctattgcactcgagcaaactaagtttaatgcatggcaaacccagcaacatgcacttactcagtgccgggccgagcttgaacaagttcagaaatacctagctcaactgcaagtaaaacagacgcacttacagcaagaacttgagcaaacgtttaacctcaatcaattacacattgagcttaatcaagctcctgaacaaatcttacaaacacttaatgagctgagacaagcgacacaaactgccataagtttatttgactcagaaaatgtgcgtttaacccaagccattaaacaacacaatcagcttattcaaactattcagcgtaatgaaagtttgcttaatacagcacagcaatggcaacaacaagttcaacatattgtcgagtgtttatcggaaaccgaacagcacgcatggcagcaagcaagtagccaaacagctaagcagacttgggctattcttgatgcacgtgctaagcaacttgaacaacaagaacagctttcacagcgttttgaacaacagcagcaagaacttaaaatgctgtctgctagccttgagcaaatgaccaagcaaattgatgagatcgatcaaaatctccaagagattacgcttaaaggccaacaaaataatgaaaaagcggtatcgctcattcagcaaatgacgggccgttcggatattaagccgcatgaatggttaattgagcacgacgctaaacgtcagcaccaacaaacggcgtatcatgaggctaaacaacgtttcgaacaaaccagacaaaactttgagcagcaaaaacaggcgctcgatcaacttaaacatcagtatcaacacacagaacaacatcaacagcagcttgatgggcaaattcaaaactggttaaaagcccatactgattttcaggcatctgatcttacagcactcatacagattaattcagttcaagagcaagatattcgtaaccgtcttaatcatgctgagcgtttattaagtgaagcctcttctgcccttaaaacgatgcaagagcaattaagcgagcacttacaaactcagccaaatattgaatacgaaaagctcgttaccctcattcaagacaatattgcaaagctcaaagcacaacttgaagtgcgtgacgggctaaagctgaagcttgaattacatcagcaaaaccttgcaaaacagcaaaaatacgccgagcaaattcaaaatattcaacaagaagaacatcgctggagcaaaatttcaggcttgattggtgatgccaaaggtaaagagttccgtgactatgctcagcaatatcacctagatattttagttgaacatgccaaccaacaactggcgatgctttctcagcgttatacgctaaaacgtcttgatcagtcattaagtcttgccattattgaccacgacatggatggagaaacccgctcagttgcctctttatctgggggtgagtcattcttaactgcccttgccttgtctttagcgattgccaatatggcatcgggttcaatgaaaattgaatcactgtttattgatgaaggttttggtacattagatgcctcatctttgcatatggtcatgaatgctttggaccaattgcaaaatcagggacgtcaagtcattctcatctcacatattcaagaaatgcatgaacgcattcctgtacaaattcaagtgaaaccacttggcgctggtgcaagtaccattgaaatagtgggttaaaaactaaaaagccccgacatcctgtcggggcttttttagattctgcgttggtatgactcctgtcgtacctgtctgcatccattcatgactttttattgttattcttagaaacatcctgtttcctaatgagttcatagtacaaaaaaagcatggtctgccatagccgcaaaaggccgcaatttctgtaagaaatcgcttacatcagcctttttgcgaatagtctctagccccaaataaagctgtgcctacacgtaccattgttgaaccagcggcaattgcggcttctaaatcactcgacattcccatactcaatgtatcccagtcttctgggtgagcatgttggacttttaccgcatcaaataattttttggcatctgcaaaagcacctgtattgtcaggagccggaatcaccattaaaccacgtaacttgattttcggtagttgactcatttgagcaaccaactcggcaacgtcttccggtgcacaaccatccttactctcttgcccatcaatattgacttgcaaacaaatattaagtgcagcttggtcatcaccacgttggttagataggcgttctgcaataattaaacgatctactccatgaacccaatcaaacttctcggccaaatgcttagttttattccgctgaacatgaccaatgaaatgccattcaatatccaaatcctgtaaagcatcaattttatctaaagcttcttgcaaataattttcgccgaatgccctttgccctgctgcatacatttcacgcaatctttcactcggatgagttttcgatacggctaaaagttgcacggtttcaggcgcacgctgagcaagttcacaagctgttctgatttgctgtaatacgtgctgtcgcgcatcttgcaggtaattcattgacaaggttctcattttcaaaaaacttttttgcttttcacctaaagtgaggtgttggtaagcctcggtgaaagccgtatattattctacaaaataatgacatattttgatttacttggggaaattatggatattacagagctactcgccttctctgtgaaaaatggcgcgtccgatttacatctttctgctggcatgccaccaatgattcgtgttgacggtgaagttcgtcgtattaacttaccagctctagaacataaagatgtccaccgtcttgtttacgacatcatgaatgataaacagcgccgtgactatgaagaaaaactcgaaactgacttttcttttgaagtacctaatgttgcgcgtttccgtgttaacgcatttaaccaaaaccgtggtgccggtgcagtatttcgtaccattccatctaaagtcctcaccatggaagatctaggtctaggacaaatctttaaagatatttgcgactatcctcgtggcattgtactggtgacaggaccaacaggttcaggtaaatcaactacgcttgcagcgatgctcgattatattaacgaaaaccgctatgaccatattttaacggtggaagatccaatcgaatttgtacaccagtctaagaaatgtctcattaaccagcgtgaagtgcatcgtgacacacacggctttaatgaagcacttcgctcagcactgcgtgaagaccctgatattattttggtcggtgagatgcgtgaccttgaaactattcgcttggcattaaccgctgccgaaacaggtcacttggtgtttggtacactacacaccacgtcggcagcaaaaaccattgaccgtgtgattgacgtattccctgccgaagaaaaagacatggttcgtgccatgctgtcagaatctttacaagcggttatttcacaaaccctgcttaaaaagaatggtggtggccgtgtcgcagcacatgagatcatgattggtattccggctattcgtaacttaattcgtgaaaacaaagtcgcacaaatgtactcagccattcaaactggtgcaaatcatggcatgaccaccctcgaccaaagcttaaaaggcttagtcgctcgcggtgtgattagcccacaaaccgcacgtactgcggcaaaacagcctgaatccttcctataaaaataacaaaatagcgagaatacaattatggattttaatgacttgctcaacctgatggttgaaaaaaaatcttccgatctctttattacagatggcgttgcgccctctatgaagattaacgggcaaattgttccaatttcaaaaaacagtctttctggggaagtgattggtcaactgttacattccatcatgagtgaaaaacaacgcagagaatttgcagaaactcgtgaatgtaactttgccattatgaaccgtgaaaaaacggcgcgttttcgtgtcagtgcttttcagcagcgcgacatgccgggcatggtactacgtcgtattgaaaccaagattccttcaattgatgacttgcagttaccgcctgtacttaaagatttatcgatgaccaaacgcggcattattatttttgtaggcgcgacaggcacaggtaaatctacttcactggcttcaatgatcagccatcgtaaccataactctaagggccatatcattaccattgaagacccgattgagtttattcacgaacatgcaggttgcatcattactcagcgtgaagtcgggatcgataccgactcatttgaaattgccttgaaaaatacactacgacaagcgccggatgtgatcttaattggtgagatccgttctcgtgaagtcatggactacgcgattggctttgctgaaacaggccatcttgtattagctaccatgcacgctaacaacgccaaccaagcgctcgaccgtattattcacttttttgaaagtgaccgtcatagtcagctttacatggacttgtcacttaacttaaaggcaatgattgcgcagcagctcattccaacaccagatggtaattcacgccgtgcagcaattgagattttaattaactcaccattaatttcagactacatccgtaaaggtgaaattcatgaaattaaagatttgatgaaacgctcacgtgaacttggtatgcagacctttgaccaagctttatttgatttatataaagctggtcaaattacctacaaagatgcacttaaacatgctgactcaccgaacgatttacgtttaaccattaaacttgcagatgaaggtcctgatcaattatcagacgggaaacagcatttaacttttgaccgccagtaatttcttcataaaaaaaggaaggttaaacgtaaccttccttttttatttgttttctttatgtgaaaacgattatttcttgcgcaatgcttcctgacattcaggttcattacagtaaccatagagatttaatgagtgacccgttaaggtaaacccatgttgttctgctacagaatgctgttctttctcgataacatcattagtaaattcaatgactttgttacagttttggcatactaagtgatcgtgatgatcttcttgcatgatttcgaaaacagaatggttattttcaaaatgatgacgttgaataatacccgcagcttcaaattgtgttaacacacggtaaactgttgcaagtccgacatcttccccttgctctaacaaagtcttgtaaatatcttcggcgctaagatgatgttgttttgaattttctaataattccaaaatcttaattcgtggaagggtaactttaagtccagctttgcgcaaatcttgattggaaataggcatgaaaaaaggtctctcaacaaatctcaagttggaataggcaatagaatttagatgaagtatgatctatcctttgatcaaatgcatcataatttattgggatagtgtagcaaaatgcaaaaactcgtgctgacgttattcgtcacttcactcctagctggttgttcaatctttggtgtatataaggttgatattcctcaagggactccattgactaaagctcaagcctctcaagtacaggtcggcatgaatttccagcaagtgcgctttttgcttggtagcccaacagtgactgatcccctcaatccacaacgttgggactatatctacaactatatcccgggaacatatgctaaaaaagcgaaaatccccgcagcacatggtcagcatttaaaaatttactttgatggaactggaaccgtaactaaaattgaaggtttagagactattccagaatcgcaaccaggtttacctgcttccaaagaagcaattttaactgccccaccactataatcgttttttctaataaaaagaaacccctctagtgaaatacttgaggggttttgcttattgagctgattgcttaaagcgattgcctttaatgtatctgcctacagggtttttcgcagcacgtttccggcgaatatcttttggattaatcattaatggtcgataaacctcaactcgatcacccgcatgtactaccgcatcagtttctacttttactccaaaaatgccgagctgaagtggttcaggcaaatcaacttgatttgataaaccacttgcttgaactgcctgtgcagcagtcattccctcttcaaatggaacagaaattaaaaactgttgttccggtaccgcaaaagcgacccaaacttgttgtgtgcgttccattagatactttgtccaattacagcaatcattgccacaataattgaaagcggcaatacgatacgtacagcaatacgccataagttataaaaaagctcattgctgaaattcatcgatttacgcaagtggctaattttcataatccaacctgcaaaaattgcatagattaagcaaataagtaagccccacagcataagaatgagcgtgaataaattatgaacttccggcacagcccaaactacaattgctacaacaataatcacccattgtaaaacaggcataagctgacgctgagcaagttgttctctagccaactgcacaaataacgcggatgtcattacaccagtaaatatccacgttaaaacgggtaattgagcctgaagcgagaaaaagccaaaagcaaccacagcaatgagctgagctaaccaaattggaagaacagtttttgttgctccttcttgcgcctgaacagcacctacactattttgccagtaaagccctaaacctaacccgctcgcgacaagtgcaagtacagttgcattaccccactccttaaactcaacactggtccaatgccaaggttgtaaagtcgagcccatcatatttgccaacacaatagaagcgattactcctaaggtcattaataaaatgagtatttggcgtggaataaaagataataccaaggcagcaactgcaaggcctgcaaaaataatttgacccgaaatgcttggggcaaactgtgcaactaatatattgctcgcagtacttagaacgttacccgctaagaaaggaataaaaacaacagcaagccagccaaccacacgccatttaggggaactatcagcttcacgagttaaactcgataacgcatttaaagcggttgtttttgatcgttttgctaaagcaatttccaaataacaaactggtaatgccaataacaacatagtgccaaaccacaataaccagaaatcgatttgacgatcaatctggattcccatggtgggtgccaaagtggccatgatgacaaaagataagcaaaacgccataagaggcgataaccatcgtgacataggtatgtcctgcattatgcattccttgaaaaagtctatagatattttgcccgtctcatgcatgaaaatcaaagtttgcacaataaaaaaagcaaaccaccgaaacgatagtttgccgcgctaactgtatattagagtttttttagttaaggttatgagaaaaaacgggcgaaccagttctttcctttcttcttttctttttctctaataatccccatcatattttcttttactgcccccacataatcggcatcatcatgttgaatatggttaattaaccatttagccaagatctcttgtaattctgcttcaatcgtatggcccatttcaaaacgttcacgatataactctatttttttaataaataagtcatgtacacgtttatgaggcactctatatttataatccgcttcctcttgtaaactttcttcaaaggtaaaatgtgattgtgtataatcaataatattgtctaagacatctttaatacgacgtctatcctcatcatcttttacatcatcaatctcattaatataatccagtattcgtttatgttgctcatcaataacgtcaataccagtattatattctgaagcccatttcattttcatacatcacccccaatgatgttcaatgactgttgcataaaccgcatcttatctttaaagggtataaataaaaacaaagctattttgtcggctttaaataaataaaaatgaataaatagttaagattttgatttttaaaaaattaattaatattaaccaactaaaaagataaagtattttttaaacaaaatactttattattaaataaacaaaaatatatatttcttaagaaattacatttctttcaataaaaaattaatattggtcagcacgagtaatacgcttaagttcaggatttttctcttcacgtattaatctttcaacttgagtaatcgctttttttataggtttaccatgttgaaataaaatcatttcaccaggttgataagcaatccatgtttcattatgagttaaaggctcagtggtaattactgcaactcgatcttcaggagtggttacctgactaaaatcaacctcaacatctaaatcaattaaatgtgcattattgaatggatattctcgaactaaccaatgtaatttagtaatcgcataactaaataaagcttgcccattcgataaacagaaattaaatgtcccatattctgcaattttaggagaaatcttttctaatacttcaaatatctgctcaagcgttggttcttcataaccaaatacttctaccagttgatctaataaataacaaaatgctctttcgctatcggtatttcctaccggcgtaaaacgtccgcttaagggtggattaaaatcatgtaaatcgccattatgggcaaaaatccagtgacgtccccataactcccgaataaaaggatgtgagttctcaagcgtaattttgccttgagtcgccttacgaatatgtgcgattacattacgtgatttaatgggataattacgaataagatcagcaattggtgattcaactgcagactggttatctacaaataaacggcatgccttatcttcaaaaaaggcaataccaaaaccatcactatggtcagaggtaattcctgcgcgttgtgaaaaaccacggaaagaaaaagtgatatccgttggtgttgcacaattcattcctaatagctggcacatattgtttttaaactttcacttcattaccccatgcgtactattgtgcatgagagtaaattggcttgtaaatcccaatatgcgctcgctattacaaaatataagataactttatcgctgagccattttgttcattacaaacgaagtggcaattttattcacttctaaaaatacaaagtaatcgagacagttaaattcagcatcaaagaaggcatctttggataatttagactgcatactcaaatacatttggaatagtttcggcatccgctcgtcttgagggaaactaaactccggatattcaggttcatagatttttttagaacgaatatcgatggttttagtgtccggtaattgctgaatttgacggtgtgtatagtacgctctagccaaattatcttgcagatgaatactgacacatcccatcaaatatttagcgcgcattgaccacaatactttaggtgcaagattcagccataatgttgaaagtgccttaccattacgaaaacgtggatgcacacaagtacgccctatctctaatacatttggcaaatgtgacaagtgtgggacaatatcaaactcattagcactgtaactttgccctatttcatggccttggaagagcttaagtcgtgtataagcaactatctctcctgtccatttttctcttaatacagcatgctcacagccaaaatcgtaaatatcttgatctaaattatcttcaaactgaatgccgaattgtttactaaattgttgtgcacgaaaccgttgtacatcttgtaattcttttaaattatcaacccattcaaagcggaattgtgtttgattgttagccttatggcgatttaaaggtaaagtccaggtttggcgatattgattaaatttttccagcataatgaacgctcctagtgacacccactacactagtcaaagctcatgacaaaaaaatgaccaaaattaaatgacataaaaaaagaccacttagcgtgatcttttaataaaaaataataaggtttagtgagttgtttgtgtacggttagaaataagcgtaccaaccccgtgatctgtaaagatttcaagtagtgttgcgtgcggtacacgaccgtcaacaatatgtgcgctcacaacaccaccttttacagcgtcaagggcacagcctactttaggaatcattccaccgtaaattacgcctgtttcgattaaacggtcaacttcttgtgtcgttaaaccggttaaaaggtttttgttttcatctaatacgccactaatattagtcagcagaattaatttttctgcgcctaatgcttctgcgaccttcccagccaccaagtcagcattaatattgtaagtattacctttttcatcaacacctaatggagcaataacaggaataaagtcgctttgagtaaacatctctaatacgtcagttttaaccccagtcacctcaccaaccatacctaaatcgatatgtttgatagaaccgtcctcttcttgtttttccattaataatttacgggcacgtaataagttaccatcttgaccagtcaagccaattgcacggccgccgtgtttattaatcaaattaacaatagatttatttacgctaccgcctaggaccatttcaaccacttccatcgtagcttcatcggtcacacgcataccatcaatacggtcagactcacgtcctaattgctttaagaaagagtcaacttgtgggccaccgccatgcacaacgatcgggtttaaacccacagttttaagtaaaacgatatcgcgggcaaatgaactctccaattcaggatcagtcatcgcattaccaccgtatttcaccaccagcgtcttaccagaaaaacgttgaatatatggcaaagcttcaatcaagatttttgctttgtcgacgccgagatgctgatcttgtggcattgcgcctctccttattaggcctcagaaagttcttgtgcaatttgcggataacgctcttgcaacatatcaataaatttttgctggatttcctttaaacgtaaaggattatcagcgtcaaatcttacggtaaaatactcacctgtatttgatgctcgaataatgccaaaaccatcatcaaaatcaagacgtacgccatcaattttactaattcgagcacccaaacgatggcttaaaatttcaatatcttgtagtacatgtttagggtcggactgatgggtgccaatataagtatcttcggtacagcatctttcaggataattagaaaataaatcagaaattgttgccgcactcgactcggtgaaatattccattacacgtaatgcagcgtacaaaccatcatcatacccaaaaccacgcccatcattaaatacataatgacccgcgtattcgcccccaaaaatagcgttaccatttgattgggataaatacgcgcgcaggaagctacttcccgtgcgaatcattttgggtttaccaccaagtcgctctacggttctttgaaccatgagcgagcatttcacatcaaatacaatttctttgtctggttgctgctccagacacatttgtgcaaatagtgacaataaacggtcagcagtaagtatattggctttttcatcaagcaatacgacacggtcgccatcaccatcaagggcaataccaatatctgccccctgttcaataatcgttttacgtagttcttttaaatgcgcagcatgtgaagggtctggtgcatgatcagggaactcaccatttggagtcgtacgtaaagcaatgacttcacaacccattttttcaagtacgagttttgagcaatgccctgccgatccatgtaggccatctaatacaacttttaaagggcgcttgagttgaatatcgttaaagattgcttgttggtattttttacaaaattctgaattaaattgaggagttgataattctaataatgaaattgtatgagtaggtacataagtttgcgcaaattcacctacttgctggatcatttcaggagatggaggttcacctcttaaaatccatttaataccattatctgatttagggttatggctagctgttaccattatgccattaccaccaaactcccgtgcaatgtagtacatcatcggggttgagcaacaaccaatatttgtaacatttaaaccctgctctactaatatctcttcgattaaatgcgcataagccggactcgttaggcgcgcatcataaccaataatcagttgagtttgttctgcttgtttatattgttgtgccaatccataggcaattgaacggacgacgtccgtagttaaataagaaagtttgcctctaatatcgtaagcacggaaaatattttttggaaatgagtgtcttacattcatagcgtatcttctatttaaagatcaatttgatctatcgcaaaaacatagagtattcaaaatctgaaaaatgggtatttgctaaaaaaagttaaaagaatatgagtaaagcgttttgtaatataattcattgtaacattcaaggtgtaaaaagaaacacttgtaaaacaagcgtttcttttcattattttttataaattaattattgtttaccagtgtgaccaaagccgcctgcgccacgtaaagtttcttcaaattcctctacttgctcaaattcagcctgaactactggaactaaaacatactgtgctaaacgctcacctggttctaaacggaatgtggtttgaccacggttccacactgaaaccatcaactcaccttgataatccgaatcaatcaaaccaactaagttgccaagcacgataccgtgtttatggcctaaacctgaacgcggtagaattaaaccagcaaaattcacatcatgaatataaattgccatacctgttttaaccaaaacagtttggcctggttcaatctcaattgcttcatctaaacaggcacgtaaatctaaacctgctgaccctgctgttgcatatgaaggtaaaggccactctttacctaaacgcggatcgagcaatttaacttgaactttcatgggatttcctaaaaattaaaaaaattaacgctttaataaagcttttaaatttgccaaatattgttgagcctgttctttaggatcaacatttgctgcaattttctttttacgccctaaccattcgagctcatcttgcggaagctcatcgaggaaacggcttggggtcatctgtttcatttgaccaccatttttacgctgctctgccaaagtcaaagttaagccttgacgtgcacgggtaattcccacgtacataagacggcgttcttcttcaatagtttcagcagcaattgagttcttatgcggcaacagctcttcttcaagacccataatatagacatatgggaattccaaacctttagcggcatgtagagtaagtaagttcactttatcagtgtcttcttcctcttgctgttgctctaacatatcaagcaagactagttttcgaatcacactttcaatgttcttttcatcaacatcttcagcacgattaattaagttttgaatactgctaaacaagttctcgatattatcgagcttacttttctcttgagcaggcgttgcggattgctcacgaatatagtcgatataacccgcttcattcatcatttgacgaactttaggcacaggctcatcatcttccaacaactcacgtgtaaacgtcgagataaagtcagcaaactcatgcaattgagtttctgcctttttaggaagtaccatacttaagcgctggtcagaagaagcaccaagtaaagacaaattattttcttgtgcaaataggcctaacttctcaagagtaactgggccaatcgcacgtttaggcgtattaataatacgtaagaaagcactgtcatcttctgggttaataataagacgtaaataactcattacatctttaatttctgcacgagcgaagaacgatgtaccgccagagagtttgtacggaatctgcatttggcgaagttgtgtttccaatacacgcgcctggaagttaccacggtacaatacagcgtaatctttccagttcttaccattcataagtttgtgagtcagtaagtctttgactacacgttctgcttcatcatcatcattacgacaggtaataattctgatgacctcaccatgccctttatcactccacaattttttatcaaaaatatgcgggttattttgaattacacagttcgcagctttcaaaatacggctggtcgagcggtaattttgctcaagtttaataatatgtagatttgggaaatcctgtttaagcaaagccatgttttcaggtttagccccacgccatgcataaatcgactggtcatcatcacctacggcagtaaactgccccattacgccaactagtagtttcaccaaaatatattgcgcggtgttggtatcttgatactcatccactagcaagtaacgaacacggttttgccatttgtcacgtacttctgcattttcttgcaataagcgggtaggcataacaatgaggtcatcaaagtcaactgcattgtaagcacgtaaattacgttcataaagttgataaagatgggcaaactggacatcttcaggagtttcacacgtcgaatgtgcttgttcaggcaaaatcagatcgtttttccaatctgaaattttcttcattgccttggcaattagttctttactctctgcacccgataaattatcgcgatgcatcaaatccatcaaaatacgtttacagtcatctgcatccaaaatcgaaaaattagcttttaaaggtaaatttttaagttctaaacgtaaaagatttaaaccaaaagtatggaaggtcgaaacggacaaaccttttgcttcttcacgtgataaaagcttagtgacacgctctttcatttcacgtgcagctttattggtaaaggtcatcgctgtaatacgatgcgcaggaatacggcaatgttgcaccaaataagcaattttacgcgtaattaccgatgttttacctgaaccagcgccagcaagcaccaataaagggccttgagtatatttcatggcttcttcttgcttgttgttcagttgactggcagatgacatcgtgtattacctcttaatttttcgagcatgattatagtcatctcttttttagaatcccaatagtaaatctacggatatgtataaatgatgtctaataatgcaatttatgcgccgcagaatgtcgtgattattttttatacttcacccataaaaaaaccacccgaaggtggtttttgaaacaataaactagatcttattgtttagcgtaaatgctgatttctacacggcggttttgttcacgaccagaagcagttgagttgtctgcgattgggttagaagaaccataaccttgtgcatcgatacggctagatggaacacctttaccagctaaatagtttttaactgattgagcacgcgcttgagataatgggatgttaatagagtcattaccagtgttatctgtataaccagtaactaaaatcgcgctcttgttatcttcagccaatgtttgagctactttgtccaaagttgcatagaagtttggcttgatgtttgatttgttagtatcaaaagtaatgctaccaggcatgatcaattgaacagaaccatctgggttacggcctacttctacaccagtaccagccatttgttcgcgtaattttttctctttttggtcaagatataaaccgccagctgcaccaagaactgcaccaattgccgcagcacggttgttttgacggctagagtttgcatttgatttagaaataccgtagccagctgctgcgccgatcaaagtacctaatgcggctttatcgtattcaacgccaccaaggttattacctgttgtttgacaaccagaaagtactactgctgcccctaccactgttgaaataactaatgcacgcattgcatgcctcctcactttgagtgttttgttgttgaatgaataatgaaacaaaaaggaagtataaaacattgatattttgttaataataaacagtttagttatttttttgtaatattttgatgcactttaaggtgtgcactcatcacaatttcttcattgttgtctaagataccgttgtatttcatttcacgatagttatagttgaacaactttctatggattttggatattcggggccatttatatgtcaactgcacccaataagcaatctgcgctaaaaaaaattacacgtggactcactgtaggtacagtcatcacaggtagcactttttttcatggaccacctgtcttagctttaggtttaacaaagctatttaaaaagtcttcaaaaattgatgaaaccaatattcaaattactaatagctggcttggtgttaataattggctgattgatcatgttttacctaatttaaaatgggacattagcattgacgaagaccttgatctgaatatgcaaggccgttatttaatgacttgtaaccatcaaagttgggttgataccacagtaaaccaatatttcgggttaacccgtatgccgcttacccgcttttttaccaagtgggaactcatctttattcctttcgtgggtcaagcttttaaaatcttaggcttcccaatgatgaagcgtcatacaaaagagcaaatcgcgaaaaaccctgaactcaaagaccgcgatatgatggaagcacgtaaagcgtgtgaacagctcttaagtcaaccttttacattattaaattatttggaagggactcgttttactcaggaaaaacacgataaacaaaaatcaccatataaacatttattaaaacctaaagcaggtggtttagctctggcgttaaatattttgggcgacaaaattgatgctttagttgatatgaccattgtctaccctgatggcgtaccaggttatggcgatttctggctaggtgacgtttcaaaaattgcggtcaatcttcgtaaaattgaaataccagactgggttctcgggggcaattatgaagatgacccagtttaccgtgaacgttttcaacaatgggtacatgaactctggactgaaaaagatcagctcatcgagaaaatgaaagctcaatacgcgactacgaatctttaaaaaagaatccacttttatgcaaaacagttccggaaagcaaacgaaatatcaccgtgtagattcaagcagcctttcatttaagctgtttttggtctacgacatctttatggtgtttattatcattttcaatctgttctgtcttgcagccaacttctttttaatgagcagtattggggcatggttctttgaacatatccatttgccccaagtattgtctttctaccgtacccatttacacccatgggttattacctctgaagcctggtttattggttttctaattattgaactactggtccgttggggaattgctatcgtttataaacatcataagcgttggttcttcttccctttcattcactggtatgaaattttagctattattcctcagctacgttttctacgtttattccgtgccgggattattgcataccgtttacacgaacttggttatccggttattcctgaaagctggagaaagacaggtctcttttattaccgtgtggttatggaagagttgtcggatcgcgtagtgattaccgtaattgacggtattcgatatgagcttgaaacgagttctagccataaacaaattattcatgatttggttaatcatcatcgtgaacaatttaccgtaaccctaactgccctattacaagaatctttagcaactgctttaaaagaacaaaagcctgcaatcacccgagctgtcggacaaattgtagatcaagcaatacaagatacgcctgaattaacacaattattaaggcttattccacttgtagggggacgtattgagcaacaaattcaaagtattggtcaacgtcttggtgaaaatatcagtgctggtttaatagaaccgttaattgaaggttcagccgcacaccctaattcaacttatcaattaatttctcaaaaaattagccatataaatattgataaccatgaacttgagcagctggttgagtctgtcgtttttgaaacgctagaagctgtccgtaaacaagttaaagttaaacagtggcaacaaacactcgcggagtatgatcgaatcaaagaataagcatttatttatttttttataaatcacgctagagaattggtacgatttgttctagcatttgctctatttacaataaacttaacgatattacagctcgttttaacgccttgaaggaagacttatggctgatatccggattaccggcagaatggttaactttagcaggataaccttcgatacgaatgatcatgatgtgatccgccagcaattatcaaatatattaaatgaaggttcctatcagggaactgtcgttattatagatagtactgttgaacaagagcttattgctttaattcagctgttagtcagcatgggcttacagcctatggctgtcattgacggtattttaggcgacgaagcacgcgccattcagttccctgtattaccggcagatcaaccattacaacgtattaaaccaactgcagagcaagttgcaattgtagagaagcctagctctgcacaagcttcagtagaaacaaaaaaaccactaaataataatgcagttgcccatattacctcttatcatgatgaaattttgcgtacaggccaatctcttgtacaagaccaaggcgatattattttaaaagctggcatgaatagtggttccgaagtgattgcttcaggaaatatacatatttatggcacggttcgtggtagagtcattgctggtgcgggtgggcacgctgctgcacgcattttttgccaatctttagaggctgaactcgtttccattgccggaacatattgtgtcgcagatgatatccctaaacatgtggtaaaaaagccagtacatatttatttaaatgaaaagcaagagcttgaatttgaagctctagaactttagtttattaagcaaatcaccaaaaaacagcccttttaagggtgtatgtatgaccataataggagtggattcggtggccaaaattgttgtcgtaacatcaggcaaaggtggtgtaggtaaaactacaacgagtgcatcttttgcaacaggtttagcccttcgtggtcataaaactgttgtgattgactttgatgtaggcttacgtaaccttgatttaattatgggttgtgagcgtcgtgttgtttatgatttcgtcaatgtaattaataatgaagcacgtctgcaacaagcccttattcgcgataaagatatcgaaaacctttacattttgccggcttcccaaacccgtgataaagatgctttgagcgacgaaggtgttgctcgtgtaattgatgagctttctcaagaatttgattacattatttgtgactcacctgcggggatcgagcgtggtgcaattttagcaatgtaccatgcagatgaagcaatcattgtgacgaaccctgaaatttcttcagtacgtgactctgaccgcatcatcggaatgttagatagcaaaactaaaaaagttgaacacaacgaaggacgtatacgtaaacatttatgtattacacgttttaaccctgaacgtgctgaccgtcaggaaatgctgacgattgatgatatttctaaagatattttacgcgtaccgacattaggtgttattcctgaatgtccaagtgtattacaagcatcaaacgaaggtaagccagttattctgtattcagaaactaaagctggacaagcgtatgatgacttggttgctcgctttcttggcgaagaccgcccttatcgacacatcacagctcaacctaaaggctggttagcacgactatttggagcgtagatatggcaggattctggagtaaattatttagcagtgaagaaaaaccatcaagtgctcaaactgccaaagatcgtttaaaagtcattgttgcatcagaacaaggtttaggccgtcgtttaagccaagacaagattgaccaaatgaagaaagaaatcatgcaggtggtcagtcgttatgttagcggtgtaggcgaacagcatatccaaatgcaagttcgttctgaggcgaacatcgaaatgttagaaatgaatatcaatttacctgaagaacgataattctatttctgactattcaataaaacagaatcaaggcaaaataacgcaagttattttgccttttttaaaatgaggagattgtcatggcattatcacagccagcaactttcaatgaagaatggtccgatgagcgtgtttttgcctacctcaaccaacttcctccaaatggtgtgaacgcagacttccatgtgctctaccatgctttcaaacatatgcgtccaaatgactatgaacgtcttttaactaaatttgttgcagatggacgagatattaatgcgactaatccggaaggcgaacgcatccatgacgtgattgctaaattcccacgtcaatcagcgccgtttttagaagttttagcaaagtttgcttaagctttttttatttgaataagactgcataatctatcttagtaaaatttagtagatagattatgtggttcattcaaatatctaaattatttacttttataaaaaataatcttaaagtcatcagcactatttcattccaaatataaattcatgaatccagaacctactaatttaaatcaaacacaatccatccaatcaaatcaaatcaaatcaaatcaaatcaaatcaaatcaaatcaaatcaaatcaaatcaaatcaaatcaaatcaaatcaaatcaaatcaaatcaaatcaaatcaaatcaaatcaaatcaaatcaaatcaaatcaaatcaaatcaaatcatatagaaaatttaaaagttattagtgtcaataagtttatctttctatccttaatttcctttggcttatacccaatttggtggatgtttaaagcatggcgattttttctaatcaaagataagttaaatattatgcccgctgctcgtgcaattttttctatattctttttatattcactatttaatcggataaaaacttatgcaaaagaacaagggtatattaatgatttctcttcaggttggatgtatttaggatatctcattacatctttactggttcgcctacctgatccttactggcttatctctctctgcagcattatatttttaataccagcctttaaagcgttgaattatgcacaaaaacaaatagaaacaacaattaagcaagaaaaattcaatacacctcaaatcattttaattattataggttctatcatgtggctgctgattcttttcagttttgttatattattcctatataagtgatctaaaagttagtaattaaaaaagcctcataaagaggcttttttattatctggatttatcggtttccaatcaggaaaataccgaaaacggtaaaaataccacctgaaataccatcaatccattttgaaaaattacggtaagcggctctaaaactcggtaatgaaaaaataaaagtcacaaagcagaaccataaaattgtttcaaccgacacaataataaaaagcagccaatgaacttgatcaagctgagggtttgctaaaaataaagagaatacactaccaaaatagatcacagctttagggttcgataaattggtgagtaatcccttcataaaaaataaatacggcgctttcggtaattcaacagttgtcacctcttcctgctgattttttgaaaatgccgaacgtaacatttggtatcctaaccagcataggtataaaccgcctgcaataagtaaaccttgctttaaccaagccattttctcaaaaataatatttaagcccatcaatgctaaagaagcccaaaacataacacccgctgttattcctgcaacaaccagcattgcttctttacgagatcggctcactgcggtctgtgataccagaaaaaaatcaggccctggagtaataagcgcacaaaaatgaataaaagctaacgtaattaacgcgactaacatgttgtcctcctgatttgtttcattgttatttattgagaagcacacattagcattttttactatttgataaaatctcaaactacccgtagtaattattatttttaaccataaaaaaagcctccgaagaggcttaattttaactatagatattaaactaaaatatcgcgcttaccgttggcccccatagcactcacaataccattctcttccatttgatcaatgatacgagcggcacggttataaccaaggctaaacttacgctgtaatgaagatgtagaagcttttcgagtttctaaaacaaacgatacacattgatcataaagtgcatcacggtctgaaccaccatcaccttcttcaaagccacgcgaagcaggctcctcatcaaatggagttaagatctcatctacgtagtctggttcgccacgttcacgccatgcatcacaaatacggttaacttcatcatcactaataaatgcaccatgcacacgttctggctcaattttacctggccctaagaacagcatatcaccatggcctaacaagtcttctgcaccacctgcatccaaaatagtacgtgagtcaattttactgtttacacgtaaagctacacgcgttggaatattggctttaataagacccgtaatgacatctaccgatggacgttgagttgcaagcaataagtgaataccagcagcacgagatttttgcgccaaacgtgtaatcatttcttctgctttcttaccaacttgcatgatcatatcagcgaactcatctgccacaatcacaattgatggtaatggcgttaaacgaggtgcacgctcttgtgtcgctgaatcacttggtttccatgttggatcaatcaagtcttctccatttgcaagcgcttcttcaacttttcggttgtagtcacttaacttacgaattttaaggaacgacataagcttataacggcgttccatttcatttacacaccagtttaatgcactcactgcatctttcatgtcagtgactacaggcgttaataaatgcggaatatcgttgtagtttgcaagttctagctgtttcgggtcaattaaaatcagacgcaattggtcaggggtatatttaagtaacatcgataaaatcatcgagttaacggcaacagatttaccagaacctgtagtacccgcaaccaacatatgcggtgcttttgccaagtctgttagaaccggattacctgaaatatctttacccattgccatactaatgagagcacttgggtcacgatatgcgggtgtttccaatagttcaatcaaacgtaccatttcacgagcactatttggaacttcaataccaatatatggtttacccggaataacctctaccacacgtacagaagccatagacattgaacgtgccaagtcacgggaaatattagtcactttagatgctttcacacccggtgctaaatctaattcaaaacgtgtaaccactggacccggctgagcttcaaccacctgagccttcacgttaaactcttgtaacttgatctcaagcaattcagataaacgggaaagctgttcctcggtaaagttaactttcttatttgggtcaaccttatcaagcaattcaaagcccggtaatgttggtaaatctaaacgttttttggccacttgcatggcacgagacattggtcgacctgatgcatctgttagaggcgcatcaaaatcaaactcatcctcaaggtcatcctgaggctttccagcagtttcctgccaagcttcaataaattcttcttttgacagcttctctgcaccaatcgtagtttgaataggcgcttttacaaaagccgaagattgcgcatagctacttgccttgatcggttgagttgctggcgggatatcctcatcaatcaataggtcatcaaaatcatcaaagacttcttcattcgataaatttttaggtgactgatttaaattcgttacaggtacagatgattcaactaatgtttgagaagcttgcggtgtaacttctggttcaacatgatgatcttgaacaaatggcgtatgcacgtcagttgccgttttactatttggaactgcagcaagtagttcatcaaaaatctcatcatcattccaatctaaaccttgatgagtatccgatggttgattttgtttagcctgataaactgtttgctgaaattgctcatgagtcgaaggctgttcacttgaatcatcagcagctcttaacagcgcatcaatttcttttttatggcttacatcatcacgctgtaacgcacgccaaacctcccccgtagccactaaacgctcactgtcttttttaagttgttgggcttgctcaagtgtacgctcaaagttttctggctgaggagttggtttttcttcaattgtttcaggttgactttgttctttagctaaaacgtcggcaaataaacgctctgctatttcatcatgtcgtgtagagctcgctttgctttgagctttttctggttgggcatttagctctacttcatccgtaacttcttctgctttaggcatctctgcaacttttaccgttgctgctttattcgcaggctgtgtggttaagtcataagcagattcgttaggagatacatttttatagaataaatcttgtaaataaccaggcattgctttgagcgtaacccatgttttgctccactgcaccccaaatgccaaagtgaacaataccactccgaaaacaagtagaaataatgtcgcaccataaattgttaacagttgagataagctttgccccaactcataaccaataatcccacctgcggcattatctaaagtatctgcaggtacattccagtgaaggtaaagcaaactcgaaacaacaagaattaagaagaactgcgcagcataacggaatgggcggtttagaaaactatgtggccaccagacttgaatcgcttcaacaaataggaagattggaataagtaaacttgcccaacctaaaaagccaaacagcaaatctgcaatccatgcaccggcaataccacttgcattggatacttgctgagtatcacttgaaatatgcatccagcccggatcaaatggtgtatatgttactgtcgccagaaacatataaatcccaaaagagaccaagaataatgtcatcaataagcgctgtgcataaacacttgacaccgcagtcatatactgtcctgtaacccatttaattattggtttagagatgtgaagacctacatttcagatcttcaacgattgaactttatattatgcacctgttcttacaaaaaaggtgcatgattctttacagttgttgttaacataaggctcttctatattgttatataacttaattcgattgacctgatcaatattatccacattgatttaacgctattggtcggcaatttcacgtataattttcaaaattctcgaaataaataaggataccctcaatgagtgctcgtcattctcggttaattattctcggttctggccctgcgggttatagtgcagctgtttatgcagcacgtgcaaatcttaaaccaacacttattgcaggtttacagcttggcggccaacttacaacaacaaccgaagttgacaactggccgggcgatcctgaaggtttgactggtcctgtcctaatggaccgtatgcaagcacatgctgaacgctttggtaccgaacttgtctatgatcatattaatgaagtggacttaaatgtacgtccttttgttcttaaaggtgatatggatgagtacacttgtgatgctttaattattgcaactggtgcgacagctcaatatcttggcttagagtctgaacaaaaatttatgggtcaaggcgtgagcgcatgtgcaacatgtgatggcttcttctacaagaaccaaaatgtgatggttgttggtggtggtaatactgctgttgaagaagcactttatttatcaaatattgctgaacatgtgacacttgtacaccgccgcgattctttacgctctgagaagattttacaagatcacttatttgctaaagaaaaagaaggcaaaatcagtatcgtttggaaccatgaggttgaagaagttcttggtgacaatactggcgtaacaggtgttcgcttaaaatctacgaaagatgacagcaaacaagaagtacaagttcaaggcttattcattgcaattggccataaaccaaatacctctatgtttgaaggtcagctaaacttacgtgatggctatatccaagtacaaagtggtacttcaggtaacgcaacagcgacttctgtagcaggcgtttttgctgctggtgatgttgctgatagtatctatcgtcaagcgattacttcggcgggttcaggctgtatggctgcactagatgccgaaaaatatctagataacctttaagtttagatatttcaaacagccgttttataacggctgtttttttggaatttataataattactggctgccctgtattaatttttatagcatagccctaaagcacatattattttggttttatgaaaacactgcctctatctcaatatattttcccagatccggaggaatcagatccagatggtcatggcttaatttgtataggcgctgacctctccccttccacactctatgaagcgtatacacatgggcttttcccatggtttaatgaagatgaacccatttgttggtggagccctgaaccacgctgtatcatttatcctcaaaactataaaccgagtaaatcgcttattcggaacatgaaaaaatatgattacaccattacggtaaatcgtgcttttgagcaagtcattcgctcatgttcactacctcgaagctatgctaatgaaacatggattagtgaagatattattgaaggctattgtggaatgtttgatgccggttatggctatagcgtagaagtctggcaagaagagcagctggtaggtggtttatatggggtaacgatcggtaaaggttgttttggcgagtctatgtttagtacccaaaccgatgtttctaaaatggctttttatacgttaatgttaattggtcaagaaaatcagcttccttgggttgactgtcaacttgtcaatagtcacttaattagtcttggggcttgtacactttctcggcaagaatatcttaaatcgttacaagatgtaattattcacccctctatcaattggaaaaagtatcaagaacgtgtattttcaagtaaaacaatagcattaaatgcaaaattaatggaatgataacaggagggaccaatcatgaaatcatatcacccgaagtcccttttaaatgatctgcaatattatattactccacctcatgattgcagctatttagaaaataaatcagcacgcatggtctttttagacccgattcatcggattgatgtggtgacgctttctgaattatcgcgattaggttttcgtcgtagtggcgactttgtataccgtcctgaatgtcatttatgcaggcagtgtttatcttgtcgtgtacctgttgccgatttccaaatgaacagcatgcaaaaaaaagcatggaagcgaaatcaagatctcaccatgactgttctaccaacacggcaagcctcacaaattcattatgatctatatgaacgttacattaacgagcgccatgccgatggtgatatgtttccgccaagtttagatcagtttgaaaaattcttggtccatagctgtacagatagtttcttcttagaactatggaaagacaatcgtcttattagcgtttcgacttgtgatttaatggatgatgggttatctgccgtctatacgttctttgacccagatgaacaccgtagatctttaggcgtttattcaattctgaatcaaatcgaatatgtaaaaacactcggtttagaatatgtctacttaggctattgggttccccactcagctaaaatgaactataaatctcaatatacgccgctagaacttttactagatgggcaatggcgccgcttaaatagatcattatcaccagaagagatcaatcagttaggcaattccctcatgaccacattaccttctgaatggaataatttaattattaaataatctgcttctgtcttgttgttcaaacagcaacaagacaggcattcttagaataaagaagcaaaatcatcagtacagctttttaccataataacggcattttcacgcccaccctcttgggttggataatagttacgacgcacatcaatttggtgaaaccctgttttttcgtataaaccaatagcagctttattactttcacgtacctctagaaaaatttgtacggggtgattttctaaacgctcaatcgacgcatctaacaactgatatcctaatcctttaccttgcatttgaggatcaattgccatgagcagtaaattcgcttcatctaatacaggttgtaaaatacaaaaaccaaccaccttattatttaattctattaccgtacattggtaagaatttaaagattctacaaattgctgcctagaccatgggtgtgtttgaacaagcttctcaatttgagcaacactatcaatatctgaggcttgcatagtacgaatcatgagtttcaacacatttttagatttcaaagtaaacgtattatagaaacttaaatagaaaaaacgagtaaaaaaaagagcaattaaattgctcttttccagtcagtttttttaaagacctaatttttcacgccaagtggccaataaagctgtcgtatccgaatcatttggatggaattttggtcttaagaaatctaataattctggaatttgacgagtcataaaacctttacggccatacatgaacttaagcatgtatttggtatctttccatgttaatttatcatcagtcttaagtaacttagcagtaaaataagactgagtagcaaaaattaaggccattgcaatgattaaagcagttgaacgcataaaataagcttttggcccctgcccatacatattggtatagacatcaaacgctacagctttgtgttcattttcttctaccgcatgccacatccataagtgatacatagtgtcatcttggaacatggcttgaatttcagggttttgtaaaagctcagccgcaatagttgaggtaaaatgttctaacgcacaggtacctgttaaatcaatcatttcttttgtataaccaaaaggtttcattagcttggttacaaccgcagtacctactttaataactttacctgtttgtttttccattttacgaacatcatatccatacgcctgcgcagaagcattaaatgcaagatgctctttagaatgcatagcttcttggccaataaaagcacttatttctttttgaagtgctggatcagccagtttaggatcatttcgcacagcacgagtactgtttacaaagaactgctctccttccggaaaaagagctgataatgctgtcataaaatgagttaatcctgcatcgtaatttgcccaatagcgtggaacttgagcaaactcaaagtccatacgacgcacagggaaacttgctccggcacgattagaaatatttactttagcattcatgtcagactcctttaagcgaatcgaaaattcacttatatccttatttattttcttaatatttataataatacgcctttaaaggcgctatttaagtgcagatgaggccagcaaattatcagatgaggtcatcaatagcctcatactagggcaaaattaacaagtatcttttaaaagtggatcataatttatagacaataaaaaaggactgctaacagcccttttcacttactttcagcttacagtccaagtttagatttccaagtttttaacaaactaaccgtatctaaatcattcgggtggaaacctggtttaaaataagccaacatctctttagccatacccgtaataatgcctttcgacgggctataaccatatttataaatcacaaacaactcatctaagtttaatttatggtcttgctttaaaagacgaaccacaaacgaagattgaattgcgaaaataagagccattgcaaaaacaagtgaacttgtgcgtaaagcataagcttttacacctttaccaaagacaccttcatacacatcaaatgcaactgctttatgttcattttcttctattgcgtgccaataccacatggttgacatcgttttatctgtcatcaactcttgaatataggtattaactaaaagctgagatgcaatggttgcagtaaaatgttcaagggctgtagtagcagttaggtccaccatttcttgcgtcataccaaatggttttacgagctttgcaaaagttttacgggcagtttgaatagccgtatcggtgaacttttctaaagtttcaacatcatgaccaaatttttgggcagaagcattaaagtttacatgctcttgagtatgcatcgcctcttgaccaatgaaagcactgatttctttttgtagctcttcattgtctttaattgctgggtgataacgcacagcacgcacactatcaataaagaacttttcaccagctggaaatagcgctgataacgctgtcataaaatgtgtaagtccagcggaaccattcatccagtattctggcacatcattaaaatcaaagttcatacgacgtacaggaaagcttgcccctgcacgatttgtgatattcactttagcattcatattgaaagctccttaccagtaacctaagttacttaaactttattgttcgttttcttgattcttatcatacaaacttaataaaaaggcttaagtgcaaatagggacattgaagtatcagttaaggccagctttcaactgaattgtctaacaattcgatataaaaaaagcgccccaaaaggagcgcttttttcactgaaaagtgattatgcagttactttagcaacaacaccagcacctacagtacgaccaccctcacggatcgcaaaacgtagacctgggtccattgcgattgggtggattaattctactgacatttcaacgttgtcacctggcattaccatttcaacgccttctttcaactggatcgcaccagttacgtcagttgtacggaagtagaactgtggacggtaaccatttaagaatggagtgtgacgaccaccttcttctttagaaagtacgtatacttctgcgtcgaatttagtgtgcggcttgattgtacctggtttagcaagtacttgaccacgttgtacttcttcacgcttagtaccacgaagtaagataccacagttctcacctgcacggccttcgtcaagaagtttacggaacatttctacgccagttacagttgttttaactgtatctttaataccaacgatctctacttcttcaccaactttgatgataccagcttcaacacggcctgttactactgtaccacgaccagaaattgagaatacgtcttcgattggcatcaagaatgctttgtcgattgcacgctctggctctgggatgtaagagtcaagtgctgctacaagagcaagaactgattcttcaccgtaaggaccagcttcaccgttaagcgctgcaagagctgaaccacggattactggagtgtcatcacctgggaagtcataagtagaaagaagttcacgtacttccatttctactaattcaagtaattcttcgtcatccacaaggtcgcatttgtttaagaatacgatgatgtaaggtacacctacctgacgagaaagaaggatgtgctcacgagtttgtggcattggaccgtcagttgcagcacatacaaggatcgcgccgtccatctgagcagcaccagtgatcatgtttttaacgtagtcggcgtggcctgggcagtcaacgtgtgcgtagtgacgagttggagaatcgtattctacgtgtgatgtattaattgtaataccacgtgctttttcttcaggtgctgagtcgatttgtgagtaatctttcgcttcaccgccgtaagtttttgcacaaattgttgcaatcgcagcagttaaagttgttttaccatggtcaacgtgaccgattgtacccacgtttacgtgtggtttattacgttcaaacttggctttagccatgatgatcttcctttattaactactcatggagggtcactccatgagcacttggtttttaactaagaattagttagggcttatagtaatcgaaagattactcgtcgtcaccttttttaccgccagcttggaatttagcgatgatgccttcagccacgttacgtggagtttcagcatatttagcaaattccattgagtatgtcgcacgaccttgagacatagaacgcatttgagtcgcgtaaccaaacatctcagcaagtggaacttctgctttaattgcttttgttccaccaggaagatcgtccataccttgaaccataccacgacgacggtttaagtcacccatgatatcgcccatgtagtcttctggagtctcaacttcaactttcatgataggttcaagaagaacaggatctgctttcatgaaaccatcacggaatgcgtaagaaccagccattttgaacgacaattcgtcagagtcgacatcgtggtaagaaccgtcaaaaagaacagctttaacgcctacaactgggtaaccagccaagacaccattcttcatacgttcttgaatacctttgtcaactgcaccgaagaattctttaggtactacaccaccaacaacttcttcagcgaattcgtattctttaccagcagcttcaacgtcaagcggttctaaacgaacatatacgtgaccgaatttacctttaccacctgtttgacgtacgaatttaccttcttgctcaacagttttcttaatcgtttcacgataagcaaccattggtttaccgatattcgcttcaacaccgaattcacgcttcatacggtcaacgatgatgtcaaggtgaagctcacccataccagcaataattgtctgaccagattcttcatcagtgtgaacacggaatgaagggtcttctttagccaaacggcctaaagcgatagacattttttcttggtcagctttagtttttggttcaaccgctaactgaattactggatctgggaattccatacgttcaagtgtaatgatgtttttctcatcacataatgtatcaccagtagtaacgtctttaagacctacacacgctgcgatatcacctgcacggatttcatcaatatcttgacgttcgtttgcgtgcatttgcacgatacgaccgatacgttcacgcttagatttaactgggttataaacagcatcaccttgtttaagaacaccagagtaaacacgtacgaatgttaagttacctacgaatttgtcgttcatgattttgaacgcaagcgcagagaacggagcttcgtcagatgcttcacgagacgctttagtttcgtctttatcgtcaaggataccttcgatcgctttaacttctgtaggtgatggtaagaattcaattacagcgtccaacatacgttgaacacctttgttcttgaatgcagaaccacaaagcattacttggatttcagaagctaatgtacgagcacgtaaacctgcgatgatgtcttctttagaaagatcaccctcttcaaggtatttgtccattaactcttcagaagcttcagcagcagcttcaaccatgtttgtacgccattcttgagcagtatcaactaggtcagctggaatctcgccgtattcaaacttcataccttgagaagcttcatcccagataattgccttcatttcgataaggtcaactacaccagtgaatgtgtcttcagcaccgattggcacaacgattggcacaggattcgcaccaagacgtgttttcatttgttcaacaacacggaagaagtttgcaccagtacggtccatcttgttcacgaatgctaaacgaggcactttatatttgttagcctgacgccatacagtttcagactgaggctgtacaccaccaactgcacagtaaaccatgcaagcaccgtcaagaacacgcatagaacgctcaacttcgattgtgaagtcaacgtgtcccggtgtatcaattacgttgatacggtgttgtgggaattggttacccataccagaccagaaacaagttgttgcagcagaggtaattgtaataccacgctcttgctcttgttccatccagtccattgttgctgcaccgtcgtgtacttcaccaattttgtgagatacacctgtgtagaacaaaatacgttcagttgtagttgttttacctgcgtcgatgtgcgcagagataccgatgttacggtaacgagtaattggggtttggcgagccatgatgtctacattcctaaatgttatctttaaaacagggcgcaccaattaaattgatgcgcacgaatactcaagcggggcaacttaaatacccgcaaagcccccactttggtagagagcaatgttgaatctagctactgtatgcatgagtattctcctgattagggactgttttatccgcttagaaacggtagtgagagaaggctttgttagcttctgccatacggtgcacgtcttcacgttttttgatcgcagcacctttgccttcagctgcatcaagcaactcgccagcaagacgtaaagccatagttttttcagaacgcttagcagcagcatctactaaccaacgcattgctaaggcagtacgacgggatgggcgtacttccataggtacttgataagtagcaccaccaacacggcgtgcttttacttcgaccataggacgaactttttcaagagtagtctcgaaaaattcaactgggtctactttgtttttttcttgaacgcgttctaaagcaccgtaaacgatactttcagcaatagattttttaccatcttgcattacgtggttcatgaatttagcgattgtttggctgctaaatttaggatctggaaggatctcacgagcagcgactacgcgacgtcttggcattttaatacacctaataatatgacacttcaggatgatccagcagtttgtacaagtgtcatgtacacgacgctggccttactatacgtcgcttgaattacaaatctatgaagaattcaaacaagcgaaacgctaaagggcttttggactagtttcccagaattacttcttaggacgtttagcaccgtatttagaacgtgattggttacgatctttaacaccagcacagtctaaagaaccacgaacggtatggtaacgtacacccggtaagtctttaacacgaccaccacggataagaacaacactgtgctcttgtaagttatggccttcaccaccgatgtagctagatacttcaaaacctgaagttaagcgaacacggcaaaccttacgcatagctgagttaggttttttaggtgtagttgtataaacacgtgtacaaacaccacgacgttgtggacaagccttcaacgcaggaactttggatttttcaaccaaagtcgtacgacccttacggatcaactgattcgttgttgccatatggcaattctcccgttattaaaaaaccttaaaaagaaaacacctctttttaagggcacataattgtaagccaagatgcaaaaatggtcaacatggcagcagttgccaaatgttgaccatatcaatgattgacaggattatttacaaatttaaataggggtgaaatttagttttcaaaccctacctttgtaattgtattgttaagagtacttttgcccctctataacgtcatcattttcttcactttcaggctctaatgctggcttttgttcactatgttcatgttcaactacatgtttctctgcaagatgctcaattccttggtgaacattttcttgaactttttcttcgcttttttcagaagtatttgatttgaccacaacagatacttttgaaattacatcatgattttcaattttatgatgctgcgtagcatggacactaccattttcacccacatttaaaagacgtggactcgctttttgaattagagttaccgccgcatagtacgcctgtaatggtgataaatgctcatttggatgttcatttaaataatgtcttgctgcaccgaaaatagcttgtgccttatggcctacatcttcttgtaacttccaactataaacagcactaagcactgcaccagctactggagtaaacttgcctaccacagcaagttgcggaactttatttaaccagttccatttaaactcaccattttcatcaactaaccagctttttaaggtttcaatatcatttgaagagccaagtacttgctggaactgttgaatatcttgagtctccaacatatttcgtaaggctttaagtgccaagagtaaagtctgcttttccgcaattaagctgatatcaacttctttaaaaataaattcaactacgtcttggtcagttgcttcggttaaatcaaagccgtgtgatctacctgtttggtaaattgttctcaaaactaggactaatgaaactggaatatctacggctgctccaaccattccagatacgcccgtaattgcaccttgaatactggcaatcaatttattttgttcaataagtgcctgacttaaacgttgggagcgtgaggtatcttttgtaagctcaaataagtctttagcccccgcttcttctaaaattttttcagttaacgtacttttcgaactaaagtcattcaaccaatcaaataaatagcttgatattttttcattccagtcaggtgaaataaatgtagcgataccattgacctttctaaaatggcgtccaaatacctgacgagtaactttaggtaaatgttcacgtaacatttgttgtgggctttcatactgctccacttcaaacggacttttatttctggcactaccttctactgttttgccatttgaaagtggctcaaccaatttacttacctcaccaatttgactttgctgcaagatgtttaaaccagtagaactgagctttttagccactccgaagacctgagaaaacaaattgtcagattgattattattaaattttgtcatccagtacctcgattttttaatttatctaattagagataaatactaggtggaatgtggatttatctcaacttgaatgtgtgtattttagttaaccctaaatgcaacatactgtgtatttggttattttttttaaatgcaaaattgacataaagatttgccataagaaataaaaaacctttctgctatcatggtagcaacgaaaacatgggtctactgttcttacagctatattctcctatcatttaatagctgctcatgatcatagactttaaatatcaccataaagggacctgtagatgaaacgtgttgtaatcactggtatgggtattaactcatgtatcggtaactctttagaagaagttactcattcacttaaaaatggaatctccgggacacgttttaacccaacttatgctgaactcaattttaaaagtcatgtcagcgctgcggcagaacaagattttgacaatattgatcgtaaattaaaacggttcatgggcgtatgtgcaatgtacgcttataactctgctgttgcagctgttgaacatgctggcttaaaagcagaagatttagcagataatccacgttatggtattgccggtggttcaggcggtggttcaactgcttctgttgtagaaatgactgaacttttagaaactaaaggtgctcgtaaagttggtcctttctttgttccacgtaacatgacaaatacaatcactgcaaacgtgggtgtagcatttaaacttcaaggtattgctcactcaattgcaagtgcttgtgcaacttctgcagacgcaattggttatgcatataaccttatcgctctaggcaaacaagatcttatgcttgctggtggtggtgaagaagatcactggtctcaaagcctattgtttgatgcaatgggtgctctgtgttctaaatacaacgacacacctgaaacagcgtctcgtccatattctaaagaccgtgacggtttcgttattgctggcggtggcggtttcgttgttcttgaatctcttgaacatgctcaagcacgtggtgcaaatattcttgctgaagttgttgcttatgctgcaaacagtgacggtgctgacatggttgctccaagtggtgaaggtgcaactcgctgtatcttgatggctcttgaagaagcgaaacaacacggcgtagataaaattgactatgtaaatacgcatggtacttctacaccagcaggtgacgtgactgagcttaaagcaatggaacgtgctttcggtgaaggtaaagttccacctcttagttcaactaaatctatgactggtcacagcttaggtgctgctggtgttcatgaagcaatttactctgtattaatgcttcaaaatgactttatcgcgccaaacatcaacgtgactgagcttgatgaaggtactgaaggctttgatattgtgcttgaaaaacgtgatacaaaattgaatactgtaatgagtaacagttttggctttggcggtgttaacgcttgcctaattttcaagaagtgggatgcataatcccgcgtaggattatcgatggatgcaccttctgatgcctttttgtgggtaaaagcattacatattattgctgtggtttgttggttcgctgctttgttctacttaccacgtctttatgtttaccatgcaatgagtgatgatgctaccagccatcagcgctttgaagtgatggaacgtaagttgtatcgaggtattatgtggccatctatgattgccacattaattactgctcactttctcgtagattggggtgatgcaactagacattaccatgaagccacttggttttatctaaaagttggattagtggctttattagtgatctaccatttagtttgtggttactatcgcaaaaagcttattggaaatgctcactacaaatcacataagttctggcgtttcttcaatgaaatgccaaccttaattttatttgctgttgtgattttagttgttgtaaaacctcagttttaactggggttttttattatctaggactctcatctcattctcttatgcattttactggctcaacctattcataatttattattcagagcaaaagacttttataccagtcttaatacattcttataaaaacatctcatcttttttataaattcaatcaacagaaaggataaagcatgaaaagtctggcttttattcatcgtaacgatactcgctttgcggtcggtgatttttatccagttctttctgttttttcctaccatgagttaggcaataccctctcacccttcttactactcgaccatttaggtcccggaaaaattgcaccttctatgaaacgtagaggagttaatgatcatcctcatcgtggatttgaaacggtaacacttgtttatgcaggtgaactggagcataaagattcatctggtggaggtggatttataagtgctggcgatgtgcaatggatgaccgcagcctctggtgtgattcatcgggaattgtttagtgaagagtattctcgatctggtggtccctttgaaatgattcaactttgggtcaatttaccagcagcaaataaaatgaattctccacgctatcaaagtttaaagaaagctgaaataccgatggtgaaactggaaaatgaagctggatttgtacgtattattgcagggcagtttaagcatgttatgggccctgcacttactcacactcctattaccgtattagatgtagagctccaggcaggtcaacaagctgccttccctgctcaatccggtgaaacagctttagtttatttacgttcaggtcgggcacaatttcataaagatgaagacgttttagaggaacaaggcctagcagtcatgtcaaaccaaggagagcatttctctattactgccctgcaaaactgcaaattacttattttgacaggacaacccatcgcagaaccgattaatggtcatggtccatttgtaatgaatacttatgatgagattttacaagcctatgatgatattaaaaatggaagatttgccaagtaaaacagaccagctgccgcatgagaaacaaatgacagttatttgcgtctgtctttcaacatagttgatgtatgttatgctacaaaccaatagatgaacttatttattagcaaaactatgttcactctcaacgcttttaaaattgtcatatatcgacaatttattattttcaccctttttatatttcgtcacttaaaaagctatccaattcgatttcttacacctgaagaaaaagctttagcacaaagggtgtttgggagtttgctagattgtgaacgtcctaaaattattgctactcgttacttaccgtggcaagcgcatggaattttgatggctccaaatgggaatatatatgtcaatctttctgactacagcagtaattacgcgctagagtctaaattcatacaagggatttttattcatgagctagctcatgttatgcaataccaacgaggtattcatgtattactaaaaggtgcgttactgcaatccgcctactatctgagttttaagtattacaacccttataaatatacttaccatcctcagaaagcgtttagttcttacaatattgagcagcaaggagaaattgctagagatatctgttcaggtaaactgccaaatatcatttgtttacctcagcttgatttgtaaccaaataatccagtttgttttcaacgtaacttttttgctaacttaacaacagaaatttgataaacaaaaaacataaaaataaagttgagatctaaatttactaatgtcaaattattgaaaataagtataaaaacttatttcaaatttttgagcgataaggcagtatacaaacaataaaaataatgaagcttgtttctattgtatacagaaaatctcgttatttttacgcagaaaatatgtgattggtatatattattgatcttgacatttttgtttactattttacgtgtttattatcgtgctatacacatcgttgaaaaattatatccataaaaatcaacactatgtgtatttatattcgttatgatctaggattaggtttgaatgaaaagttttaaagttgcccttgctcagttttctccgcatattggcaatattgactcaaacacccaaaagatgattgagcaagcaaatcaggcgaaaaaacaagacgctgacctgattatttttcctgagctttctgtgattggttatccagctgaagacttattgttacgtccaaatttaaataagcggatgcaaaaggcttttgctcaacttagtgaagttaaagatattgtgatggttttcggcttcgtaaaccagacagaagatggccaacgttataattcagctgctgtcatgaaagacggtcaggttttaggtgtcttcaataaacataacttgccaaactatggcgtttttgatgaaaaacgttatttccaaaaaggccatcagcacttggtgtttgagtatttaggccataagtttggtgtactcatttgtgaagatatctggtcaatcaatacagtaaaacaattaagccaattaaatgttgatactgtacttgtgcttaattcatcgccatatgaagtgggtaaaccacagcatcgtaaacagacattaagtgagcttgcaaagcagcttcatttaaatattgtttatgttaaccaagttggtggacaagatgatttaatttttgatggcacaagttttgtcagcaatcaaaatggtgaaattgctttacaagcacctagctttaaagaagatctctatattgctgaatttgaccgcgatacaaaattatataaagttgtcgagtctgctcctgcattagaaacttttgcagagatctatcaaggcctagtcatggcaacacgtgactatgtagaacgctcaggttttcctggagtaattttaggtctttctggcggtattgactctgcccttacgcttgctattgcagttgatgcaatcggtgctgagagagttcaagctgtgatgatgccatatacttacacatctcaaattagtgtagaagatgcagcggaacaagctcgccgtatgggcgtgactttcggtattgccgaaattcattcaatcgtaaatagcttcatgcaaactttgtatccgttctttggtaattcaccagccgatgcgactgaagaaaatttacaagcgcgtgctcgtggcacattacttatgggcttatctaacaagtttggtaatttagtcctttctacaggtaataaatctgaactttcagttggctattgcacactttacggtgacatggtgggtggctttgctgttctcaaagatgtttataaaacaatcgtgtttgaattagcaaaataccgtaatagcttaagtgaaactccggttattcctgagcgtgtaattactcgcccaccttcagcagaactacgtccagatcaaaaagaccaagactctttaccagcgtatgatgtattggatgctatcctttatgcatacattgaggaagatttaggtcaggcagacattattgccaaaggttttgataaagaagttgttgaaaaagtcatccgtttagttgatcgtaatgaatataaacgtcgtcaaggtgcgattggcccgagaattacttctcgtgcatttagtcgcgaacgacgttatccgattgtcaacggttggacagcgaatgactgagcagaaaaactcatcaaaaactacagcacttgctcaagcacttttgcttgagcaggtggaatttttcaaaaaacaattatctatagaaaactcacctatttatttccggcaatttattcagctttttatgcaacatgccgacgaaattaaactttatgaagttgtggatttagaacaattacaagccgttgtgaaacgctatgcttttgaaatgcagcttggtgcaggcttgcttgagtttattggggaaattgcacagcgtatttatttatctgccatgaaatctccagttcagctacaagacttggtatccgatcaccagtttgaaatgtggctttccaagtttttggaaatggagcatattccacattatctcaatcagtttttaagaactagcccatctgtccaacagctttgccaatatattgccacttcaaccttagaacaaaaattacctaaatttctaacggcctctagagtggatgactaccattttgaatggcaacataaactcaaaaaattctcttttttacagcaacaacgtcttgagcataaacttgaaacgtggattgccggctttattcatgaacaactgacagaattaagccttttatcggctgaagatttagaaagcttagtacgtcatatctgggaagatattagacataaaaaaatctatgagtttatgaaacagctcactcctctcgatgttgaggagttctttgttttaatttatgaatactggaaagaattacgacagtcacaatttatgcaaggtcttattttgtatggtgtcgaagttttttatgatttttataaagatcagagtttatttgaagtattaagtgcaattggtttatccgaaactgacttacaaactgaagctttacgtttttatccaaaagttatggatgcctttaatgagcacggtattttggaaccgttacttcaagcgctcttagctcctttttatcaaagctcaaaaacactcgatataattgaaaaacattttagtgagtaaaaaatagataaaaagaaaccacgcaggagcgtggtttttaaaatggtggctatgacgagacttgaacttgtgacccccgcattatgagtgcggtgctctaaccaactgagctacatagccgtaaactgtgtgcgcattatctatagttctgtatagcaggtcaatacttcaaaactctttatgcccaccaaatgaacaaatatgattcagatcaccattatttgttcattttttagcaaattcttactttaagcaattgatcggccacagaaatatattaaagatctaatatcaattttttgccttttgctcttgatacacaaatcatcatgctcttttgtgaagctttttcggcatcacttaagtattgatcgaagtgttctgcttcaccttctaagatagcggtttcacatgtaccacaaaccccttctcggcatagacattccacatcaatatttaatgtctcgatggcttgtaaaatagtctggttactttgtacttcaatttcctgattagatttggcaagtaccaccgtaaatgcttcaccatcttcaggaactgttgaggcaaattgttcccaatgaatgtattcatcgcggtaacgatgcttgttacaacaatcaatcaccgcatcaatcataggtttaggtccacatacatatacatgtgtgccttttggttgcgatgaaattaattcatctaagttaagcatgctgccttctgaatcgacataactaaatacgtgctctgcatgtttctgctttaattcatcaagtaaagccgcgtgttcaggtgaacggtaagcatagtgcagctcatactctgctccacgtgctgccagctcatccatttgaggtaagaatggtgtaataccaataccaccagctatcaagatatgtttattgcctgtttcagctagcgggaataaattttttggttctgaaatctggatttcacagccttcattgcactgatcatgcatgaaaactgatccacccttaccttccacatccttacgaacgcagacttggtaagttgataaatcttgcgtacagctcatcaatgagtaggcattagaaagttgttcattcattttgacaataatatggcttcccccactaaatcgaggaaagttctgcccatcttgacgtttgaacgtaaaccgtttgattaaaggggttagctgttccacacgagtaacaaccgctgggaacatttcataatgactcgccatattagaatccttcttttaccgcatatttttgttgttagggcttatccttaaagccctaaacacatgtatttaatggtcatgaattcttcaagaccatattttgagccttcacgcccaacacctgattgtttcacaccgccaaatggtacaacttcatttgaaattgcagtggcattcataccgaccattccatattcaagctgttctgacactcgccataaacgtgaaatattttcgctataaacatacgctgccaaaccgaagattgtgtcatttgcttgagcaaccacatctgcttcatctgtaaagcgaatgagcggcgcaactggaccaaaaatttcttcttggacaatttccattgtacggtcaacgttagttaaaactgatggttcgtaaaaggtttgtcctaaagcatgctgcttaccaccacaggcaatcttagcgcctttgctcactgcatcatcaattaactgctgtgctttcaaaactgctttttcattaattaatgggccaatttgtacgccatcttcaagtccattaccgactttaaacttttgtacttcttgtacaaacttctcggcaaaagcttgataaatattgtcatgtacataaatgcggttagcacaaacacaggtttggcctgcattacgaaacttggcaaaaatcgcgccttgtacagctttatctaaatcggcatcatcaaacacaatcagaggagcatttccgcccaactcaagcgccaattttttaatggtgcttgaacactgctgcatcagtaagcgtcccactggcgttgaaccagtgaaagtcaacttcttcactttttcatgtgaagtaaataccgagccaatttcttgagatttaccagtaacaacattaatcacaccagctggtatacctgccttttctgcaagctttgcaatcgctaatgcacagtaaggtgtttcattggctggcttaatcacgaccgtacaacccgctgctaaagctggcgctgctttacgggtaatcatggcaatcgggaaattccacggcgtaatcgcagccaccacacccacaggttctttactgataataaagcgctgctggttatttacggttggaatcacatcaccataaatacgcttgccttcttcggcaaaccattgaataaatgatgcagcatagcgaacctcgccttttgcttctgctaaaggcttgccttgctcaatggtcatgattaaagcaagttcatcggtataatcgagaaccagtttatgccaagccaataagatatcagcacggttttgggccgttaaagctttccaactttgtaaagccgtataggcagcttcaattgcttgggttgcctccgccgctcccatattaggaattgtgccaatttcttcgcctgtagctgggttactcaccggaacagtcgcatttgactgtgcagctaaccattgcccattaatataggcttgttgctgaaatagttcagtactttgtaaactcgacatatcgtcttcctaactgaagaatcaggtgtaagtcatgtttacacctgaataaatccctttgtttttattgatggtactgcgccacaagatgttggaagtaagcaataccatgctcactgataccagaacgttgcttgtcagtcatgatacggccttgaccacgataaccacgtgatttcaaaccacgttgtacgctctctaccaagttcaaatcttccggacggaatacattgcgataccactcaatcaaatctttttgatcttgagtcagttcttcgttagtgaagtaaatatcgtaatgctgcaaagttgtttctgcatcaacagggaattcataaataactgtcatgaagttactgcctggcggtacgttgaacatggtgcaaggccaagtccagaaaccatgaaactcaggatctgttactgatggatcaagtttgaatgacttctcagatgaacgtgcaaagccatattgcaatgtccagttttgatgagttgtatgccagtatttatcgacttgtacagagtcagcaaagcccggatgtgcaggtccacagtggtagcattccatgtagttatcaacaatcactttccagtttgctggtgtttctgtcacaaagcgtgctgccaattttaaatctttaatcacaccacatgcttgatttaaacgttcagcaaagcccggcagctggtcttctacgcaagtcgcattttcatccatattaataaatacgaaacctgcatattcttcgacttttaaaggcaccatgcttgagttttctttatcgaaagattcaacgtggtcacagttacgtgccaatgccaagctaccgtctagcttaaacgtccatgcatgatatgggcaggtaattacattttttgctttaccactaccgcttaaaagttcatgaccacggtgcgggcacacattataaaatgcgcgtagaacactatctttaccacgaatgatgacaatattttcaccaatcactttacgggtaatatagtcatttggctgagccaactcactaccatgtgcaacgcagatccagcttttagcaaagattgcctctttctcgtgctcgaaaacttgagatgaagtatagaaaactttagggaaagtccatgcaacatctgggtttgcgcaaaaatcttcaggtaatttttcaactgcactcatgtttttactccattaaattcttttcgtccaaatgactcgatattaaattgatgtcttttcgacactgccaaacatgcggcgtatcgcactcagcatgttttgatataactgttgaacttccggacagtcacgcatcagacgtaaactgccatgtaataaacctttgcctaaatggaactcgttagggatacctgcttgttccaatttttgggtaaggaaataaccgtcatcacttaaagggtcatattcagcaacggctacaaaacttgtaggcatatctgaaaagtccgtcgccaataaaggggctagacgtaaatcctgccaatcttgtgagtccggagcatattcctttaaataaaaatgcatatcttctgtcgttaacaacggcgcatgggcgtgcttttgtgcggatgcagtatcaaatgctgtcgttaaacatggataaaccaatgccagcccttgagcttgtaaaccactatgttgtagttccactgcaagggcagctgctaaattaccgcccgcgctatcgcctgctagaacgatattttcactatcgatttgccaagctgaaccatgttgtttaagccagtgatagactgctaaacaatcttcaaaggctgctggaaagcgatgctctggtgccaagcggtaatccacactaataacaaccgcatttaagtccttacacaaataactgataataaactcatgtgaatcgagtccacctaccatccaaccaccaccatgtagatacaacacacatggccaaccagactcaggtcgatttgtttttggtaaatacacacgaacaggcacaggatgctcttcatttgcaatcactcgatcttctacatctaacttgtcatcacgtggcaaagtgtagtgtcggcacatggcatcatatgccgcacggactgagtcaatatctgcatctgctggtgaataaatgctgctccagtacacaaggctttgcatttcttcacttaaggcataagtagcctgttcatatgtcgtcattaccgttccctctagctggtttttctatccagtttgattgagcttgcaagctcaagctgcatccgttttgcatgttcatcttgagtctggtttaaaccaatttcctgatcatcataaccttgttgctcaattaaatgtgatgggactttggcataatcctgtatgagccatttcactaagccataggtctgaatcagaataatcacgatgaatggtaaagccgtcacaatagttgccgttttcatggtgtctaatggtgctttactaaagatcatggcaattggaactaaggtcagcatgacacaccagaacagacgtgcatttggcgatgggtcttgcccttcacttaaaccgcgtgtacatgttgctgaaactgcatacccaactgcatccatatgcgctgccaagaacaccaccataatgccgaggaaaatccacatcatgagttttccggcaggtaataggctaagcaattgaccaatcgcaacctcaccaccttgttgacttaagatttgtggcacatttacagccccatgaataaagctataaacactatagttttcaaacacaccaaagatgaaccaaagaccgacactaccaccaattaccatggcaaagatcacttctttaatagtacggcctttagaaacacgcgttacaaagagtgccacacccggtgcatatgaaatccaccataaccagtagaaaacagtccattcacgggtaaacttgccgtcacccattggatcggtaaacaagctcatatcgacaaagttagttgccattaatccgaaactcattaatgaattattcaaaatgaattgagtcggaccaaagcaaagtacataaattgcaaataacactacacccaagcacaccatatggcttaaacgctgcatgcccttgtccatacctacatatgaactgagtgcgaacagaactgaaactgccaaaataatgatgaccttggtcataaaggtatttggaatgcctgtgagctgagacaaaatattggtaaatgttacggcagtgagtaccaatgaaatcgtcaatgcaccgaacatgcaaagcaagaacattaagtcgactaaacgaccaaccacgccggttgatttaaagcctgtcacagcctcaatcactgaagctaaacttaaacccttgttttttctcacatgatagctgtagcacaaagaaattgatgccaaagcataaattgcccatgcacttaaacctgagtgaaaaaatgaataagccacgctatatttcaatgcttctgctgactcaggcggtaagctcaaacctggagtttgataatagtaggcccagtccaaaaagccccagtacaatgtagaagacccaatacccgacaagatgaacataaaaatccatgacattgtgctgtattgaggttttccttctccaagcttaatttttccgtatttactaaaggcaagaccaaaagtaaaaatgatagctaaaaaagcaaacagtaatactggggttgtaaataccgatgtcgtccactgcatccacgttgcagcaatctttatcgattcttgcgaataaatcgccaaaccagcaactgaaataaatacaaacagtaggctggttacggcaagaaatttatccgtataaatttttgtgttttgattatccatatccatacatccatttttggatggcgttattccatagcgaatacgtccattttagtttgggctacacatgatgcaattgcatctcctacctcataagtttttgcctgaccgccgatatcggctgtttttggaccattaattaatacattttcaatcgcctgcataatatcttgacccgcttggatacagcgctcgtcttcttcaccaaagaattcgaacatcatggcacccgaccaaatcgcagcgattgggttggcaatttgtttaccgtaaatatctggtgccgaaccatggacaggttcaaacagtgatggaaattttctttctgggtttaaatttgccgatgcggctaaaccaatggttcccgtacatgcaggacctaaatcggaaagaatatcgccaaataaatttgatgccacaaccacatcaaagcgttcaggttgtaaaacaaaacgagccgctaaaatatcaacatgctgtttatcagcttgaatttgtggatactgttttgccatcgcatcaacgcgctcatcccagtacggcatgctcactgcaataccatttgacttggtcgctgcggtaatttttttcgcatctcgctgatttgcaaactcaaatgcataacgcaaaattcggtctacgccatgacgtgtaaatacggcttcttgtaaaacaaactcgcggtctgttccttcaaaagctttaccgccaatcgctgagtattcaccttcactattttcacgaaccacgtagaagtcgatatcgcccggttttttacctaccaatggacatttcacacccggcattaagcgcactggacgtaaattcacatattggtcaaaaccacgacggaactggagcagcgaaccccaaagcgaaatatggtcaggtactttatctggccagcctacagcgccaaaataaattgcatcgtagccctgcaaagtttcaaaccagtcatctggcatcattttgccgtgctcaaggtagtaatcacagcttgcccaatcgaaagcatctaactgaagatcaatgccgtacttctctgctgctgcctttacaaccttaataccttctggtagaacttctaaaccaatgccatcgcctgcaatcgtggcaactttatatctttttgccataagcttccttcacaccttcgactaatatccttgtatggcttaaacatgatgttttaagcaaaaatgatcaacaacagaactatcactccaatggacacggatcgtgaataatctacctaacctatcggatttaaaggttttttgcacagtcgccaaactaaaaagttttgtcgaatctgctgaggaactcgggacatcgccagcttttattagcaagcgaattaatattttagaaaacacgttgagctgcaaactttttcatcgcagtacacgtcacgttagcctgacagaagatggcaaactcattcttgagagagtttcaaatattcttgaagaatttgatgaagtttgtgaactggtcaataacccactcagtacgcctacgggtcgtatggatattattagtagctttggttttggcagaaaacatgtcgcaccaattttgtctaaattaatgatgctgtatccaaaactacagattcattttgataccatcgacaataccaaagacctgattcaacacagtattgatttagacattagaattggtaatgaaattgcacccaatatgattgcgaagaagctggcttctaattttcgtattttgtgcgcgtcaccgagttatttacttaaacacggcgtacctgacagtattgaagatttacaaacacatgactgtttaacaattagtgaacgcgaccaatcctcggttttatggaaatttaggcatgcttccgaagatgtctcagtgcatatcaaaccccgctttgtttcaaataacggcgaaattattcatcaacttgccatagaaggtcacggtattattttccgttcgatttgggatgtagcagatgaattgatcaccggccaacttcagcatattttgcctgaatactggcaagatgcagatgtctgggcggtttatccatcacgactcaaaagctcctccaaactgcaaacctgtattttgtttattcaaaatgaattgctcaatcgtttacagcatgtgcaaaacctaagccgtggacaactcatttcaccagccgtcaaacgagaaccaccgcctgaaaaagtctttctataaaaaaaaccctaagtgggcctgttcacttagggcaatagtttacttttaacttttagaaataatatccaattgaaagataaaacagtttatcccaatcattactgctaccttgtgcaaggccattcgccccaccacctaccattggatcatttttactcataatatattcaccctgaataccaatggctttgtaattaaaataaacgcctgcaattaaacgctcagagtctttatatccatcctcatctttgaaaaagcggctatgagagatatagggcttaatattttcaattttgtggaatggctgagcaaaggtatagttaatttcattgactagatatttgcctttgttagcaacttgatacggataatcaaatgctccaatggttgagctatttggcaataaattatcgccattagtgacatcttgcttacctgctaagaacatccattgccatgcttgatattgcgtttgagcaaatacattccatgatttgcggtgtccatcttcatctgttcttttattttctaaatctgaataccaaactgaaccacctaactcggtcgaaaatttttgagctttatcaagctcaaattttctagaggcccgcgcaatccacatatttttttcttcaatattggtccctaccgtcaagtcatcagcttcaacgaaattaccactatatcggcttgagtcttttgatgtccccttataatttcctccatcagttggatagaatcctaaggttaaattgtatttgtcatctgcaaatttatatttaatccccagattatcaatatcttctaaaccaacggtatttaaaagcgtttcgtaataactacttccccaaaattcaccaaagccaaaatcaacaggctgcaaacctgccgtgactctttgttggtcagataacttataccctacccaagctttttttagaaaaatcgcatcacacaagcgatcatattgataacagcgagcatctgctcctgcaatccagtttggattttcataacccaacactaatttaatatctgtgagtcgccagtcatcattttgggaaccttcattcgccccgaccacataatctttatgtaaatagcgagaacgtattgcaccagacactttaaattgacccgaatctaaagttggatcaccccaactcaaatcagctgcagagacttgtgttccagcagttaaacttagaattcctaaaaataataatgaccttttcatgtcttcaacatccttgttaagtgttataagaacatgaagaaattggcttagacaaacaatgccagaagtatgaagtcggtctttacaaactgtgtttaatcaaaaaaacaagcataaaaaaagaccacgcaggagcgtggtctgtaaaatggtggctatgacgagacttgaacttgtgacccccgcattatgagtgcggtgctctaaccaactgagctacatagccgtaaactgtgcgcgcattatcttagcttcttaaccgcgcgtcaagaaaaattttcaataaaatgaggtgaagtgagcctataagccgggttctgtcgaggatggtcattcctctaggcgtacaatcactcatacgctcaagcgacctacccgaatccagtacgggccgcacctaggattcctatttggtcttgcttctggtggggtttgccatgccgtgaactgttaccagacacgcggtgcgctcttaccgcaccctttcacccttacctcacgaatgaggcggtctactctctgctgcactttccgtcggctttcaccgcccaggcgttacctggcaccctgccctatgaagcccggactttcctctcctgcttcagtcacggagacctccacagcagcgaccatccggctcacttcgagggcgcatattaacaaatttattgactaattgcttgtgcttttttgagcaattaatcttttatatttgtcgagtaactgttcttccgtttcctcatgctgcggatcttttggaatacagtctactggacaaaataattggcactgtggctggtcatggtgaccaacgcactctgtacataaatccggattgatttcataaatcacttcgcccataaagatcgcttcattgggacaaactggttcacaaacatcgcagtttatgcattcatcagtgatatataacgacacgttaccaaccttgttgatgtttacgttcaaaggcttcaaccacagcttgcggaacaaacttggttacatctccttttaaacgagcaatttctcgaattaatgtcgaagaaataaaagaatactgttcagaaggtgttaaaaacaccgcctcgaaatgtggatcaagctgacggttcatattggccagttgaaattcatattcaaagtcagaaactgctcttaaaccacgaagtactgctgtggccttttgttctttaaaaaaattaaccaacaaaccatcaaaacctacaaactcaacatttgatagatggcctaatgatgattgcgccagtgcaactctttcttctaagctgaacaaagggtttttatgatgtccaattgcaatcgctactacaacttcatcaaacattcttgatgctctagtaactaaatcaacgtgcccattcgtgatagggtcaaatgttccaggataaattacacgcgttttagacatccgctagtactctaattgtattgtgcgcctattttagcaaaagttatacatgagacgaaatattgatatgtgggaaaaaacttcaccttggcatcagtttacggcacaatagggacaattgtggaagtttgaattatggcgaaagcaacagtagtaaagaaacataatggcggaaccattgcacaaaacaaacgtgcccgtcatgattattttatcgaagaaaaatttgaagctggcatgtctttactaggctgggaagtaaaatctttacgtgccggtcgtatgagtttgacagaaagttatgtcatttttaaaaatggtgaagcattcttatttggtgctcagattcaaccactcctttctgcatctacacatattgtgccggaagctacacgtacacgaaaattattattatctcgtcgtgaacttgaaaagcttatgggtgcagtgaaccaaaaaggttattcgtgcgttccattagcatgttactggaaaggtcatctggttaagcttgaaattgcactcgtgaaaggtaaacaacttcacgataaacgagcaactgaaaaagaacgtgactggcaacgtgataaagcacgtatatttcataagtaatagactaaaaagcctctttatagaggcttttttatttttcactaatttaatctatataaaagcccagcaatatattcaccaaaccatttagccgtatctaaatcaccttgcggcggtgtaatttcaacaggtgcattatctgattgagtcatcaaccctaaacagctcgataaacggtttaaatcggtttcagtatggcctgttgtcattaaaggtaaacctgaccacaacatgccgtgctgcatcgcaaaaatattaagttgttgcagaaccgccagtttatcaccacttaaaccgcccgaatttgcaaaacccgctgctaacttaccctgccataaacgatttttccaacgtttagatgtactatccataaactttttaaaatcggcagttacgcttcccatataagttggggaaccaaaaataatgccctgtgaggcatctaaaacatcccaatcaatatgctcaatattcatcacatgtactttgacgcccatcacttcggcgccacttgcgatagcagacgctacctttgcagtgtggccatagggactgtgatagacaatagagagatgtttttcaggcaaagacataagcttaatattttgagcgattttttctattttatcattttattaaaacttgctaaaccttcctctataaacatgaaatctcagtacttgccttaatttcttgaataaatatggaaaattcaaaataaaaaactctcttatgctattttgaaatttaaacaacataagagagtattattaaaacaatcatatccttaagaagaaatatgatttttcaaaactacataaaaacaaaagttgccatacggccagttttagcgtcacggcggtaagaaaaatattcatcttgctgttggtatgaacactgatctccccctaaaactttttcaactcctaggctctgtaagataaaacgagcaattgcatacaaatcagcatgaaatttatttggagctgccccatcaataaatgtagtttccaattcaggatatttactacaaaaagcagtttttacctctgctccgatttcaaagcaaggttgactaatcgctgcacccaaccatgcccatgttggagggttctgcattgcagcaactgtattttcaataatacctcccgctaaacctcgccaccctgcatgtaagttagcaatttctgtaccttcagcattaccaagcacgacaggtaaacaatcggctgtcatcatcattaacgcatgacctttggtttgcgtaatcaagccgtcgccaattaaagctgtaaaaggaatttgttcatttactgtatggcaaatcgtgctatgtgtttgggtcatccatgtcatttttttaaccccaaactgagcaaattcatctaacagcatcatccgatgctgctggacacgctgagcttcgtctttaacgtgcaaagcaaggttaaaacctgttagctctgtttgctctgctggtaatgccaaagggtgatgaactcgtgtctgccctacgaatacgccttgaggtaaaccctgaacaaattccatataccagtccttaatatgcagcgttttctgtacgtaaaacattaaccaactgcgtaaaatcttcaggccatggtgcttcgaataacatttcttcaccagtacgaggatgttttaagcccaatttagcagcatgaagtgcttggcgtttaaaaccgcgtaaagtttcgatgagtaactcagatgcccctgccggaatacgtacacggttcatataaacttgatcaccgaccaaaccatgtccaatataactaaagtgaacgcgaatctggtgggtacggccagtctcaagttgcgcttgtacacgggtaaagtctctaaaacgctctttcacgttatagtgcgttacagcatcacgcccacccggcaaaattgccatttttacacggtcaaccggatgtcttttaatcggctcatcgattgtgccacctgcgataatattgccataagtgactaagtcataaatacgataaacagatttatctcccaattgtttactcaaagaaaattgtgcttcgagatttttagcaacaactagtaaaccactggtatctttatcaatacgatgtactagaccagcacgtgaaagctcggctgacttaggtgaatggtaaagcaaagcattgaccaaagtacccgaggtattacctgcgccaggatgaaccaccatacctaccggtttattaatgactaaaatatcttcatcttcgtaaacaatatcgagtggaatattttctggttgactgttggtctgtgcttcaagctcaacatttaaagttagcgtttcattgccttcgcagcgatatttaggtttgacaatgttaccatttaccaacagatgaccttctttcatccattgtttaagtttttcgcgtgaaaactcactccacagcatggctgccacttggtcgatacgttgccctaagtagctttcatctaactgaacttgcaacgataaacgtgttgcagttgtatcagaagtatggttatctgcatcctcagaatcttctagtaaattgaagtctgtttcagagaagtttgtgtttgaagattgtgctgaagtcatttgatcatttagataaaagtggtttaatagcgcaattgtagctcattgcccaacataacagaggagtttttatgtcgctaccacgttataaaattacgatgcttgccttatctttaggtgtagcgtctgcatttgtgggctgtagcagcaatccaagtaaaaaagaagtggtcgatactggccctcaatctagtgaacaagcatattttgacaaggctcaaaaggctcttgatcgtggtcaatatcttgacgctaccaaatctttagaagcgattgatacttattatccaactggacaatacgcacaacaagcacaacttgaacttctctattcaaaatttaagcaaaaagattatgaaggtgcgattgcactcgcagaacgttttattcgtttaaatcctcagcatccaaatgtagattatgcttactacgtacgtggcgtatctaatatggagatgaactacgatagcttgttgcgttacacctctttgcaacaatctcaccgtgatgtgagttatttaaaagttgcatatcaaaactttgttgatcttatccgtcgcttcccaagtagccagtattctgtcgatgcagcacagcgtatgaagtttattggacaagagcttgctgaaagtgaaatgaatgcagcgcgttttaacgttaaacgtaaagcgtggattgccgcggctgaacgttcacaatgggtgattgaacactatccacaaacacctcaagtaccagaagctttagcaactttggcatatagctatgatcaattaggtgataaggcaacttcgcaacaatacatcgaagttttaaaacttaattatccgagccttgtcaataaaaacggcactgtcaacatgcgtgctgcacgtaaagaaggtaactggatcaaccgtgcaaccttaggtattcttggtcgtgaatctaagtctgtaacacctgatacgactacttcttctgaagctgaaccaaaacgtagtctactaaaccgcgtaagctttggtttaattggtaactcgggtaaagaagaagctgaagaaacaactaacacacctgttgaagcaccaaaaagtgaacgtagttggactaatcgcttaagcttcggtttactagataaacctgagccaaaagcagcagaaggcgcaacaattgcaccagcaacgtcttcgagtgaagcaccgagtgcctcaccagcagataacgaagcagatgacgctgctcaataagcaataaaagcttaaaaataaccaacaaacaggcaagtaatatcacttgcctgtttgtttttataaaatagtaaaatatttatcgggcatatctcgattcatcatgtcagaataatctgacctatcgcatcattagtttaaacacggttatctgaattatggcaattccacagcatacgattgatcagatcttagatcgcacagatattgtcgatctgattggtcaacgtgtgaaactgaaaaaaaccggacgaacttattctggttgttgcccttttcatcaagagaaaacaccttctttccatgtttaccgcgataaacagtattatcactgctttggctgtcaggcgaacggaaacgctattcgcttcctaatggacattgataaccgaaactttattgatgtgatgaaggaattatcgagtaatacgggagtcgaattaccaaaagataatactgataataaaaaactgtcttatacgcgccaagttacaaagccatcaacaccgcccaaaacggttgctgaaccgactactcaagcacctatagaagatcagtacaatacgtttgaacccgtatattttgatgatccctttgcccagtttgaacagccatttagctttgatgagccagtacaagaaggtaatttatatgaccttctagaaaatgttgcccagttttacgaacatcaattaccgactagtcaaaaagctaaaaattactttaagcaacgcggtttaagtgaccagactattcagttctggcgtttaggttatgctcctgaagactggcagcatctagaaaaagctttcccttatgatattgagggcttaaagcagcttggcctcatccgttcaagtgacagtggtcgtgacttcgaccttttacgtgatcgtgttatttttccaattcgggaccctaaaggccgtgtagttggctttggtggtcgtgcgctcaatgatgaaattaagcctaaatacatcaactcgcccgattcggaagtattccataaaaatcaattactgtatgggctatacgaaggccgaaaattaaaagcaaatgactggttaatggtcgaaggatatatggatgtcattgctttacagcaatatggcattactggtgcagttgcgactttaggaacggcaagtaataccgaacaccttaatatcttatttaaacaaaataaccggattacgattgcttttgacggtgatgctgcaggtcaaaaggccgcacgccgaactttagaaattgcattacccttactcaatgatggtcgtgagctcaaattctttgtattgccaaatgaccatgaccctgactctttaatccgccgtgaaggggtggaaaatttccagaagcttctacagcaagctcctttactttctgactttgtttttgctcatcttactgggcaacatgacattagtacgcccgaaggtaaaagtcttgttatgggcgaattaagagaattgactgagttattgccaaaacaagggtcttttcgctatctactaacccaatctttccgtgaaaaattaggcttaggtaagcgtttcactccacaaattagccacgatgcatccctatcttttaatattcaaacgaaagatgaagactttgcaattgcaattttgatgcatcatccgtttctttatattcattttgaaggattacgggcttatattccgcaagatgagttgttggctaaaatattagcaattttaaaccgtatatttgacgaattgcctgatgaccaagaactagctacctactatgttttaggtgcttgtagcagttattgccatgaaattgcagatattatgcaaaggaccaatattcaagccttaactcaagcaccggaagtagcagataaactcgcaaaagaatatgctttaggcttacaagaaagatatttacgtcaaaaactaaaatctaaaatctcattagttgagtcaagaaacttaagacaacaactcaatgaacttaccaaacagattagcttaagacttctttcttaacgtttgggttttcgctcatgatcgaatacatcctgtaaatgttgctgtaaccattcaaaatagtccgggctctctgcttttgcagcttcacgcaacaacatagaggtcggatgtattagtttttgcgtcaaacgatgggcaaattgctgcaacacttgctcaggatttccaccatgatgcagagcctctaatgcctgggtaagctctcgctgactaatttcttcactatgttggcggtaagcatgaattgtactgcccgcctctttgactttttgatgcgtaattagctgggtggctagctgattaaccatcacctcagcttcaacagccgcttgacgacgttgagccaagttttcatcgatcacactttgtagatcatctacaccgtataaatacaccccatcaagcgactctactttagggtcaatatcacgcggtacagctaaatcgaccattaacatttgctgataacggcgtttttttaatgcagttttgacatctgcataagcaataacctgatgcaaactacccgtacaacttgaaacaacatcggcacgatatagattctcagccaaatctgaaaaatcaataatctcaacttcaacttgatgtgcaatttcttgggccaattgatcggcacgttcacggctacgattacaaataatcatcttggcgacgcccatttcagctaaatgcttggcaacaaggctgttcatttcgcctgcagcaaccaccataaccgttagtttttcaggtttactaaaaacctgtaaagcgagctgggcaactgcataacccattgaaacggcatgactacctacagctgtttcagagcgcacacgtttagcggcgtaaaaagcgtactcaaatacactatttaattctggagaaactgtttgcgcttctttagacaatgctagagcacttttcacctgccctaaaatttgcggttcgcccaacatgagtgagtccaaaccacttgctacacgcattaaatgtgtgatggcttgagcattttcgtaacgataaacatgatgaattaactgctttacatcaatattattggcatcagctaaccatttcagaaggctttcggcatcttccgccatggcgtagacttctgtacggttacatgttgagacaaccactaagtcttttaaagactcgtgatgacgttgttcggcaagcaaattacttaatcgctctgcattgaaagcaatttgctcgcggagttctacagaagctgtttgatggttgacacccaatgcaaagaaagacatatcagatcatcatttcgctaaatttatgctattgtgcaacatcggtgtcataaaaagcattactttggatcaataaaaattgcgtcaaatgaatagccgtattaattttaacggtgcttcgataagacagtattctaccacattcttattgttaggtagcatgtcctcatatgtctatgcacgtccagtgcaagagacctatgccgtgcattcatttgatcaggctttacagcagagtatggttgctgaatttgccttagcttatgacgatattcccacagcactgcacaattacacagtgcttgcgataaaaagcaactcaacaacaattaaacagcgtgcattagacgttgcacttgaatataacgacttacaagctgcattaaatattgcaacacattgggttgttcaagagcctaaagatgtccctgctttattttatttatcgcatattgcgctaaaaacacatgaatatcagcttgctgccgagactttagataaaattttaaaaatagatccaactgccgatcttgaacaaattttggcaagcattgcacctgaaaatgcacaggatcgagaagttttattaaccgctttacgttctagtgcagagaaagacaacccatccatcttagcgcttattgccaacctagaagcacaaaatggtcagttagaaccggccttaagtaccattaatcgcgcactacgccgtcgccctaaagtgaccagctttatcttaatgaaagccaatttactaatcgcactcagtgatcaggaaggtgctttaaaatggtatgcaaaatcaagccgtaaatataagaaaaacctagacattcgcctagccgaagtacgttacctcatccagattaatcaaccccagcttgctcttgaaaaattagagaaaattattcaaagcaatcctcatgctgaagaggctttgtttattgctggtttaaccagtattgaccttaagcaatatgataaggcagaacaatatctggttgatttacgcaactctgcaaaatatcaaaatgaggcgtattactacttagcgattaatgctgaaagaaaacaacattatgaaactgctaaagcttattaccgtttagtcgatggtagtttgtatattgtttcaagacgcaatctcattgcgatctatgataaacaagaaaacttacacgacgctttacgctttttaacccaagaacgagtcaattatcctcagcatgcaagctttctttaccaagctcaagctgaaattttaaagaagatgggcaataaaaaagctgcattaaatttattagatgaagcgatcaaaaacttaccagatgatccggagctcatctatgcagaagttttattattagacccttatactgaccgcgataaactcgataaaacactcaaacaattattgcagttagaacccaatagcccaacgtatctaaacgcctatgcttatacattagctttgcaaaatcgtaggcttaaggaagcacgtcaatatgctgaacaggctttagaatatgcccctgaacaagcttctattctggatacgctaggctatatcgcatttttacaaaatgattatgaagcggctgcggaagctttaggcaaagcatatgaactaagtcataacataaatattggcattcgttacgctaaggcactttatatgcaaggatcattaactcagttcagtgccgtgttacaacaactgaaacaaaagcacgcaaatgatccacaattacaacaacttgatgcgttaattttacctacatctgcaaaaaagagttaaatttatgagcaaacttgcccaactgtgcacagcgatctgtggatcaagtgttttatttttaaccggttgtcagcattttactcaacctaaagctgcagttacccaccaagtacaagacgaaaaacacttcaatttacaaggtaaaattggagtacgcaccccccagcaaactggtagtgcattctttacatggattcaacagcaagacaatttcgatatcgaattaagcggtattttaggtgttggaaaaacacaaatacagggtaaacctggtgaagttactctaaacagtgctaaaactggactgattacggctgcatctcctgaagaacttttagagcgtgcaactggctggcaagcaccaattactcatttaaccagttggattttagcgaaacctgcaactttaaatgctcaaattagtaaagataatgcaaatcgtgtgagccaactcatcgaagatggctggacagttaattttagttatgatggtgaacaaactctaccaaataaactgattttaaagcaggctcttgctgaagataaagaaaaccgtattacaatggtgatccaaaaccgctaatccttacttatataaatctatgattcgagtaccttctccagctaagctcaacctgtttttgcatatcacaggacgtcgtgaaaatggttaccatgaactacaaactattttccaacttattgatttatatgactggatgacatttacgcctatatctgaagatgagattcagattgaaggtttaggtgaggttcaacttgagcaaaatctgatttatcgggcggcacagatattacgccctcacgctcaaaatccttgcggactccatataaaaattgaaaaaaatattccgatgggtgccggtttaggtggcggttcttccaatgcagcaacgacgcttattgtcttaaatcaattatggcaatgtggtctaactgaagaacaattagctcagttcggtgtcaagcttggtgccgatgttccaatttttatttatgggttaaatgcatgggctgaagggattggtgaacatttatcattcatagacttagatcaaaaacaattcattgttttaaaacctgattgttttatcagcactcaactgcttttttcacaaaaaacattgacaagagattctaagcccactacattttgcgcctatcagttagaaccttctaatttcggaaataactttgagcctttggctagagagttataccctgaagttgaagaagcaatgcaatatctcgatcagtttggtcatgcaaagcttacaggtacaggtgcttgtgtttttgctgaggtaaccgatgaaatgaatgttgatgacattcttaaacatgcaccatgtaaagcttacttggtacatagtttaaaagaatctcctttacgtcattttaaagttgcaagttaggggcgtcgccaagtggtaaggcagcgggttttgatcccgccatccgttggttcgaatccagccgcccctgccattttccacctgtaatgatgattgtattaggggcgtcgccaagtggtaaggcagcgggttttgatcccgccatccgttggttcgaatccagccgcccctgccatcttaatacagcatcgaatttaggggcgtcgccaagtggtaaggcagcgggttttgatcccgccatccgttggttcgaatccagccgcccctgccattctcttatttaaaagacagacttaattgccttgctttttgttgattaaccttgacattgcattgcaaaaatattaaagttctgccgcattaggggcgtcgccaagtggtaaggcagcgggttttgatcccgccatccgttggttcgaatccagccgcccctgccatctacttcattacataccaaccgccaagggtgcttcatgcccaatcttgtcgtttttagtggaaatgctcatccacagttcgctcaaaaagtcgtaagtcacttacatatccctctaggtgctgcatcagtcggtcagttctctgatggtgaaatttcagtagaaattactgaaaatgttcgtggtaaagacgtatttatcgttcagcctacttgtgctccaaccaatgacaaccttatggaaatcttggttatggcagatgctttgcgtcgtgcaagtgctggtcgtattactgctgttatcccttattttggttatgctcgccaagaccgtcgcccacgttctgcacgtgtgccgatcacagcgaaagttgttgcagacatgcttaccactgttggtattgaccgtgtcgtaatgattgacttacatgctgaccaaatccagggcttcttcgatattccagtcgacaacatctacggtactcctgctttgcttgctgacttacgtcaacaacaacatgacaaccttatggtggtttctcctgacgttggcggtgttgtacgtgctcgtgccgttgctaaacagatgggtgatatcgatttagcaatcatcgacaaacgtcgtcaaaaagccaacgagtcgcaagttatgcacttgattggtgacgtaaaagatcgtgattgcgttatcgtagacgacatggttgatacagctggtacattgtgtaaagcagctgatgcgcttaaacaattcggtgcacgtcgtgttgttgcttacgcaactcaccctgtactttcaggcaaagcaattgagaacttacgtaactctgttattgatgagttagttgtaactgacacaattcctctttctgaagaagcattaaacttaggcaaaattcgccaagtttctgttgctagcatggttgctgaaacgattcgtcgtattaataacgaagagtctatcagcgcgatgttcgatagtttataatattgcagcttttttcttaaccctagctttggctggggttttctatcactaaactggtcgcaagtttagtttatttaatctttaatgaggatttatctcatggcaaacttcgtattaaacgctcaagcgcgtgctgaagacaaacaagggaaaggtgcgagccgccgccttcgtcgcgaatctttagttccagctatcatctacggtggtaacgctgagcctgtagcagttactttagaacttcgtgagcttgtaaaagctttagaaagcaacgctttctttgaagaagttgttgaaatcaaagtaggtgacaaagttgaaaacgttaaaatccaagcgttacaacgtcacccagctaaaaacactcctatgcacgctgacttcaaacgcgcataagtgtttaaaggcgtagattagtgtcaaatatttcgctaattgttggtttgggcaatcctggttcagaatatgcccaaacccgccataatgcaggtttctggttcgtcgaacagcttgcagataaatatggcattacattaaaaaatgatccaaaatttcacggaatcagtggtcgtggtaatatagaagggcatgatgttcgcttacttctacctatgacttatatgaatcgttccggacaaagtgttgttcctttctcaaaattctatcaaattgctcctgaagcaattttgattgctcatgatgaacttgatatgaaccctggtgtaattcgcctcaaaacaggcggtggacacggcggtcataacggtttacgtgatattgtcccgcatattggcccaaattttcatcgtttacgtattggtattggacatcctggctcaaaagaaagagtttctggacatgtgctcgggaaagcaccaagtagtgaacaaagcctgatggatggagcaattgatcatgctctctctaaagtaaagttacttgttcaagggcaagtaccacaggccatgaatcaaattaatgcgtataaaccagcttaaattgttgaacaatcaagcttgctatcttgcttttttaggagcaaaatgcgcatcagccacctagccggcggcaaaggcgaaagatttcaccataagatcttcatcttaggtctactcaggagacgctagccatgctatctcgtttattaaaatgcaaaattcaccgtgcagttgtaacccatgctgaacttcactatgaaggttcttgtgcaattgatggcgtattgatggacttagctggtattcgtgaatacgaagaaatccacgtttggaacgtaactaatggcaagcgcttcacaacttacgcaattcgtggtgaagataactctggcattatttcagtaaatggcggcgctgctcaccaagcagatgtgggcgatttagttattattgctacttttggtgatttcacagaagctgaagcaaatgcccataaaccacgcttggtatatgcgaacccagataacacagtcaatcacacagcgaactgtattcctgtgcaagttgcctaattaaagatttaaaaataataaaaagcccgtaaatacgggctttttttataagactttataaacttctggcagttcccttccaccagctctgttgctgcttacaatttagaggctgtagctcttctccacgtaaatcaaataaaatcgcctctccttttgcatttaccttaaattcagcatatttcgctttctcatagcaatgagctaagccttcggcaaataagaaactgcgagaagctgggtacaaagattgatagtgattgtccggattttttaaaattaaattctgctcattagataaagagttagggtctaaaatagtacggattactcgatttcgtgaatctaaaataacttttgctggaacagaagcatgattaaaaatcacctgatctaaagcttcactttcacttcctgtcagagctttgagagattgtaaatttaattcataagccaacgccatatagtccccttgtaaaatagaacgaggatcaactggtttcagcttaataaaaatacttttactctgatgcaggtgccattcatttttcatcactaaacctgcaaaaaataaaacagtgactattgcaagcataagagagaaatactttttcattacttttctccctcaatacaattaattttagcttctttcataagtagcccatatagagccagcaatataatgcccgacaccaagattgatgcacttttagctaaaaaacttaattgtaaactgtaataaagttgccaaagcacaaaggcaaatactacgagcgtaacaccataaacaatgcgatctttattttttaaagcccatgtcaaaataacaaataagatgaatacttcaaaatagccgagtgcaataagtaatatgccaaaaactaaaaaggcaaaaaaagttataccgtgaagttgccgatagagatagaaaaaactaaagcataataaccatacgcacggcaatgcataaaggaaccatagtgactgatcagccgaatcaacaagtgctaatcctataaaggtatcaaagaatgaactcacccaaattacaacgagcgtacataagaagatactccgcttatacgatacgaccgctttacttcctatcagtagtaccgagctaaaaaccaaatagttaagtaagactaaatttaaataagtctgagtagagtttaaggaccataatgaatgatccatttgtagtagatagattactgctataccataagttgcaagcatttgaattaaaataaagaaccagtgaggcttaagaaaataactaatacataaaataaagatctgggcaatcaatacccataaaatttgatctgtttcagaaccaagatggaataaaaaagcagtctgtccactcacaaataaacaatatgcaaactgccggatgaaataactttgcgattttgttagtaaagttatagctacagcaacaaagatgattccaataattaaggaaatagtctcccaaaacaccaaagtaaatgctgcaagcgctagaccagcaagccaagcaccaattgccaaaggaataatataaaaacggctttgacggaaaatcttgattaagaaataactaatgagtgcaaaccaagtaaaaataatccccgcgatcaataaaaagatgaactcattagaatctttaaatagttgattaataccatccacaagccatatggtcgccgtcacaccaagaacagcagccattaaactggcacacaactgatcatctttattaaaaaaataataaaaagcgatgattcctagaaaaaaagccgagatcagataagataaattttcacttgataggaattgaatcattcctgttattgaaataacagcaaaccaagcaataaaaataaaacgtaaagccgtatatttcttttgacagatccaaaattgcacaagacttaataaatttagagcaaaaagataaagatagggaaacttctctgcccagaaagcctgtttaaaaaataaaaacagggtgagttggcttgtaatacaaattaaagcaaagattccaatatttggtcgatatagccacggcaataaaagcaaagtccaaatcaagaaaagtaaataactgtctgcaccagtttgataaacttgcccaattacagccaaactcaaaccgaccattaagccgcagatgccatgtaaagtttgccttactccctcacttaaagtcttcttgacactcacccaagctgtaataagtaatataacaggtggaataatgagttgaatgctatctggaagcatcaaccaattagcagcaattaagtgcagaatactgagcgccataaatacataactgaaaatatggagatgctgaataaataaagtattcctaaaaggataataatctcttatctgcatgaaacacctgttttatttataattttctagaaaaaacataacattcacttttaagctcaacaagtaagctcttgttaaaaagcctattttaatttatgaaaatacttattcataaagagacttagcattctacaaaagcatctagccaattttgccaagcgcgctataataaaacccatcgcttcagggcggggtgtaattccccaccggtggtaaagttaatttttattgttaaattaacaagcccacgagcttaaattatgtaatttgagcagatttggtgaaactccaaagccgacggtatagtccggatgaaagaagacgacgaactgaaataaatccattttatttcagtgccagcctgtttttgcatcagtcctgaaatgttcaaccgtattcttacgagagcgtttcattatgtctagtttaattcaaccagaactttttttctcagccctctctcctgctgagcaacgcattcaacaagcattagaagatatccgtcaaggcaaacctgtcttggtgatggatgacttcgatcgtgaaaatgaagcagatttaattgttgcagcagaaaccctaactgttgagaccatggcacgtatgattcgtgatggctcaggtatcgtatgtttatgccttactgaagagttagctgatcatcttgaacttccaccaatggtttctcaaaactcaagtcagtttcatactgcatttacagtgactattgaagctgctcaaggcgttaccactggcgtttctgctaaagaccgtgtaacaacgattaaaactgctattaaagatggtgctgttgcaactgatcttaaccgtccaggccatgttttcccattacgcgcacgtaatggtggcgtgcttacccgtcgaggtcatacggaggggactattgatctagcaagattagctggtttaaaacctgctggagtgttatgcgaattaaccaatccggatgggacaatggcatcaggaattcaagttttagcatatgctcaaactcatcatttaactgtgattacgattgaagaacttgttcaataccgccagcaacacggtatttaaaataaataaaaaggtttgacttgttcacttgcaggtcaaacctctaaattataattcttgaaatttaagaaactttcttttgtgcggcctgttcttcaacataatctaaaagttcagaaaattttgtaatctttgctttaggttgtgcttgagtaagttcttctggtgtcccataaccataagtcaccgctaccgcttcaataccattatggcgggcgcctaaaacatcatattgacgatcacccaccatcaggcattcttctgggtttaattgctcacgttcaagaatataatggataagctcagctttattggtccgctcacccgttaattcactaccgtaaatttgtacaaaatattggcttaattcaaaatgatctaaaattcgttttgcataaatcgttggtttagcagtagcaacgaacaaccgatacccttctgcttttaaggccttaagtgtttccgcaacagatggatatacttcattttcaaataaaccaatcaccgagaaacgctcacggtaagcaagtaaagcttgctcagctagtgcatcatcttgagtagctaataattttgctaatgacgcttttaaaggtgggccaatcgtccaatcaatatttaaatcggcagctaatggataacctaacttatccattgcataacgaattgatgtatggataccaactttaggatctgttaaggttccatctaaatcaatcaaaatatgttttatagccattcaatcactaacccagtaaagtatttaattcaattggtcgagagtttaattaaactctcttatactaacgtaaatttaaattgaaaaggaaataaccgtgcgtccaaccgtactttgtttctcgggtttagacccttcaggtggtgcaggtttacaagccgatattgaagcgattggacaaagtggtgcacatgcagcaattgcatgtacagccctcaccattcagaattctcaacaagtatttggctttgaagcaacctcaaaagaactattattagcccaagcaaatgctgttgtaggcgatttacccattaaatgtgttaagtctggcatgctaggcactaccgacaatattgcggctctagccgaatttttacgtgctcatcctgactatcaatatgtacttgaccctgtcttagttgcaaacagtggcggttcgttaggagaccaagcaactttagttaaagcatttgttgaactgattcccctagcgacactcattactccaaatacagttgaattgcgcgctttaacaggcgttaccgacttagatcaggcaacccaaaagttatttgaaatgggtgccaaggctgtattagtgaaaggtggacacgaagatacacctgactttattaaaaatagtttatatattgatggcgagcttgcagcaagtagtacatgtccgcgccttgaaggtgagtatcatggctcaggttgttcattagcgagtttcattgcaggtcgtttagctctaggtgactctttaaaaattgcagttcaacatgcagaaacatggttatttggtgtgttaaaaaatgctgaaacacctgtactcaatggacaaaagattccaaaacggttttaaccaataaataaaaaaggcgctttaagcgccttttttatattcctattattgaggaatacgtaaaacttgtcctggaaaaatctcatctggatctttcagcattggtttattcgcttcaaagattttttgatattgattggcatcaccataaaactctttagcaatttttgaaagattatcaccagatttcactgtataaaatttgctttctggctcaggagttgcaacagtcatctggtcatctacttgtgccacatgatctacattacccacaataagaatgattttttctttatctgcttggctttggacttgtcctttaataatagcagtgtcagttgagccattatatgttacagataagccttccaccccaaggcctaagcttttaatcaatcccaataatttattcgcaatttcttgtgcagaaggttctgctggtgttgctggagctgcttgtggttctgctggtgcggtatttttcttaccaataccttttacaaaatcaaaaagacccattatttagtcctcatattattgtttatagtaaagtcattaaactgacccttattgttatacttgaaaaaagagatacctctgctatcaattgaggttgatcttgtaaaaatatgtatctctatcaattatcttactcgtataaaaaaagccaccttccggtggccttcttttttaatcagcaatatgcgaattaaccaagttttttagttacatagtcaattgcagattgaactgtagtgatttcgtttgaatcttcatcagggatagtgatgtcgaagtcattttcgaaagacataacaagttcaactaaatctaaagagtcagcacccaagtcatccatgaaagatgcttcgtttttaatctcttcagctttaagaccaagttgttctgcaaccgcttgtttaacgcgttgttcgatatcgctcacaggaattctcctcattgcttgtggcgtttgatttgccactagtttaattgaatataaaaatttttaaaagtttatacatcggcgttaggccatgtataaaccaccatttacatgtaataccgtaccggtaatgtaacctgctttatcacttgcaaggaaactcaccgcatttgcgatatcttgtggctcgcctaagcgatttaaagccacttgatcactcatttttttgcgaatgtcttcactaagtgcatctgtcatttctgttgcaataaaacctggtgccacactgtttacagtgatttggcggctacccatctcttttgcaagactacggctaaatgcttcaatacctgctttagcagcagaatagttcgcttggcctgggtttgcaaagtgagctacaacagaactgatattaataatgcgaccaaaacgtgctttcgtcatacccttaagcacacgtttagataaacgataaacggctttaaggtggatattaaggatgtcatcccaatcatcttccgacatacgaagcaacaaattgtctttcgtaatacctgcattgttaacgagaacaagtacaggaccatagttctgttcaatatgagacacgactgcttcaatctcatcgagattacgcacatcgagagccaaacctgcaccttgttcaccaaagctatcagttagcttttgtgcaccagattcagaagtcgcagtacctacgacaaaataaccgtcttgaataagttgctgggcaattgcagcgccaatgccccgactcgcgcccgttactaatgcaactttgcgttcttgtgtcatgcaatttttccttctgccactaaaacagcatttagggcatcttccattttgctcttactatcaatagaaaaagctttttcaatatttggtaaacgctttgcgagattactcaatactgtacctgggccacactcaacaatgtactgaataccttggtcttgtagagactgcatggtacgtgtccattgtacagactggtacaattgtgctgttaaagcctgacgtaattgagcaacatcggtagcaattcccgcgttgacattttgtattacaggaatggtaggtagctcaatggcagtttgttccaaagcttctgcaaatttttctgctgccggcttcatcaatgaacaatgtgatggaacagaaaccggtaaagcaattgctttagcagattgttcttttgccaatgccataacttgctgtacagatgcagtactaccagcaatcacaacttgaccttgtgaattatagtttgctgcttcaactgaaccttggcctaatgcagatacgctctggcacaattcaactactttatcatcagctaaaccaagaatagcagccatagcgccttccccttgaggaacagcattttgcatgagttttccacgcaaattaactaacttaactgcatccgccaaactcattgaacctgctgcaactaaagcgctgtattcacctaaagagtgacctgcaaggtatttaggagctaaaccacctaaatctaaccataaacgccataaagcaatactggcagttaataagacaggctgggtattttctgtttggtctaaaccttcaccactttgtgcaatgtgccaaagatcaaatcctagcgcgtctgaagcttcggcaaaagtttgcccaactccactaaactgttctgcgagttcagcgagcataccaactttttgtgaaccttgacctggaaacacaaatgcagtttttgtggctaaagctacttgttcaagacgtttagcagacataagaaatcctttttgggttttcactcatttctctggagaggaaatttaacatttaatttgtatatttataattgcgaaaaacaacaaaaaaagggagctttcgctcccattttttctatacttaagcatcacgcttaatgcatatcatgcaattattcagcatcagctgctttagcgaataattggcgaccacggtagaaaccgtctttagtcacgtggtgacgacgatgagtttcaccagttgcttggtctactgttaatgcattctcggttaaagcgtcatgtgaacggcgcatgtcacggcgagagcgacttttacggttttgctgaacggccatgatggctccttacaaagatcgaaaaaatggatcagaacaaattcagttgtcttatcccataatcataacacaaattatgagttaagtttacccttcaaacctgccaaaacatcaaacggattatcccgtttctcttcgacaacgttctgaatggtaggttgatgtttatgttcacaagcatcatgcttgggagataaaggcatcaacaataacagttcatcttctagtaatgcgagtaagttgatcgaggcaggtgtatcaaaatcaccttttgtcgaagactcactttcacctaaaacgatgaaatcagcatcctcatccaagcgctctatcagtgactcatcatctacaagtgcaatatgaaagtcagaaacaattggcatttcaacaggttccaaacaacgttggcactccattggaacttttgtttccatgtgaccatctaaccacacaatgcgatgataggcatccattgatagcttacagtctatgttgatcaattggttatcaattgacccaacagcttcacgagcaatacgagcaaagcgagacaatggcagttgacctgaccatgtaaagccttgttcagcccatttaaacggctcaatctgtgccggaaaggtatttgctgacataattaaggcggcaattctacaaattcatcggtactctgtcaaagattaagatacaattttgtacttctttagacagaactcggggtaaattaagcaatgcacctgttgcagccgcaacctgaagttaacacttcattactcgtttgcacccattcaacccaccagaaccctcttttacctgacgtggtgcaactctcaccatggccaagctcaaaattagagtctgagcaagttgattggcttattttacactttaatcactggttttcccaccataatgtgacattagttcgtggagaatttgaaccagaatatttcccggcgaacgatcatgagccagcgaaaattcaatttgctcatggttttttcaatagtgctcttcacgaaattagccattggacaattgcaggtgcaaaacgtcgcctattacccgatttaggttattggtatgcgccagatggcagaactaaagaacagcaagatttatttgaacaagtagaaatcaaacctcaagccattgaatggttatttgcacagtcttttggcagaaaattcagagtctcgctagataaccttacgggcgatggtggagatggcagaaagtttaaagataatgtttatgcccaagttcaacgttacttttctggtgaagcaaagttgcctgccgatgcagcaagattcattgaatgtatttgccaatgtacgcgagcaggtgcagcattacaattaaatgaatttaaacgtgaactccttgattaaatgacaaaaaaactacgtaagttacttgcttcataagtttgaaaggtctaatactatttttaataatggcgtgatggagtctctaaaatatgctgcatttacatgtacatcctgaaaatccacagcaacgcctcattgaacaagcggttgagcgtattcgtgccggagatgttgtggtctaccctaccgatgctgcctatgcaatcggatgccagattggtaataaaaatgcgatggaacggattgcccagattcgtggtttaggtcctaaacatcaatatgcaattatgtgttgcgatttatcagatatcgcgacttatgccaaagttgataatgcgacgtaccgtttactaaaggcaaatacaccagccatcaccactttcattttaccggcaaccagtgaagttccacgtaggttaatgcaccctaaaaagaaaacgattggtctacgtattccaagtaatccaatttgtcaggctttattaaaagagctcggtgaacctttactcaccagtacattaattttaccggggcaagaagatccactagatgatccttacgatattgaaaatcaattagctaagcgtattgatgtctttattgatggcggttttggtactttaacaaccacgagtattgttgatttatcaggtgagcatcctgaaattattcgtcgtggtgtcggtgatgtaagtgcttttgaataagcacttacttttcattttttaccaatagtttaaaaaaaagcattatcaagaaaaaaaatactctttatttagtttggattttttttacactttagtcgttaagcaatttattaaaagtcacaattcctttagaatgcttctcactatctgctgttcttctgctacagctcttattgacttgaaaaacaagtctcatgcttttgaaaattcgcgtggcttataatcgtaatgaaccaatcacttcatcaatccatggaagacgttccacacatccgtgttttagatgagtggcacgatacgattcctgaggatctttatattcctccagctgcctttgagattttgctcgaacagtttgaaggaccactcgactttttaatttatctgattcaaaaaaacggttttgatctcatccagcttgatattgctcctattgcaactcaatatttggcttatatggatagtatgaaatccttaaacattgagctgactgccgactatatggtcatggctgctttattggctgatttgaaatctcgcttacttttacctaagcctactgtagtaagcatcgaaaaagatcctaaacaggatcttattgatcgactcgaaacttatttacgcattaaacaagccgctgaacgtttaggccaaatgccagttcttgaccgtgatacattcagtgccaatgtaagcttaggtcatattgcacctgtttatgaaggttatgatgtttcagcattacacgatgctttgttctgtgtatttaaccgtccggaacctgtaacacacacaattgcgcaagagcctgtactgttagaagaacgtattgcttatattgaagagaaattagagtcaggcgacgtgttaagttttaaagaattacttaatccccaacaaggccgtatgggaatggttgtaacttttatggctgttttagaattgacccgacaacaaaagattaagattattgctacaggagttgaagctccactagctattcaagggtcttcaatatgagcagttttgaacaaaataataatgatttgtcattagccgatattcatcatgaagttttattacagcttgaagccattatttttgctagtgaagcgcctgtctcaattgcccgtttaaaagaagcatttaataatcaatataacaaacaacagcttcgtcagcttttacaacagcttgcccttttacaacatggccgttccattgagttgattgaaactgcgcagggctttcgttttcaggtaagatccaaatatcgcaatatcattgcgcagatttggccagagcgaccaacaaaactgtcaccatcattactagaaacgttggctgtcattgcgtatcatcaaccggtcacacgtgctgatattgaacaaattcgtggtgtatctaataatagtcagattctcagaacgctatttgactggaactggattaaagaagccggttttagagatttacccggaagacctgcgttgctaattacaacgcctcaatttctgaatgcttttggtctagcctctctaggccaattgcctcccctgcagaacgccaaggaagcatttatggctctcgatgcaaatgcaccgaagtcataaagaggtggactgttgatcattatgtctaaggttgtgctgtcatgagtgaaaaattgcaaaaagtattagcgcgaatcggattaggttctcgccgatatatggaagaggttattgccgcaggacgcgtgagtgtgaacggccgcattgcccaagttggcgagcgcattgaaccaggcgatgaattacgcattgatggccgtaaagttcagttccagatcgaagatgaaattcgtcgtcgtgtactgatttattataaaccagaaggtgaaatctgttcacgtaatgaccctgaaaagcgtccaaccgtatttgatcatttaccacaaattgcaaatgaccgttgggtaatggtaggccgtctagatattaacagtacaggtttattactttttacaaacgatggcgagcttgctaaccgcttaatgcatccatctaatgaaattgaacgtgaatacgctgtacgtgtaatgggtgaagtaacaccacaattacgtcaaaacatggtcaatggtgtagagcttgaagatggccctgccaaattcgaatctttctctgaaattggtggtgaaggtattaaccgctggtatcaagttgtagtgaaagaaggccgtaaccgtgaagtacgccgtatttttgaatcacaaggccttaaagtaagccgcttattgcgtactcgctacggtactgtcattttaccacgcgaattacgtactggtcgctggatggaactcgacaaaactgacatagacaacttggcaaaatctgttgagttaaaaccacgtcaaggtacaggcttatttggcatggcaaaacgtcgcaccgaacgtatgacagaaaagccaatggcagcacgccgtggtggttacttacgtcagcaacgtcgtgatgatgaaaaagaagcgccagctaacacaggcaatcagcgcaaatcgactggttttaaccgtggatttaaaaagttctaagtaaagtttttaaatcaaaaaccgctctaaattgagcggtttttttatggcctacttttttaattaattcatttttgctagttcaatccattcagcttcagggaaatgaatcgctatataatccttcaaataatttgaagtatcttgagagattaatggatcttttgattcatcttttaggttgtaaaccaaagcttttagtttcagaccacgtgacttaagcgcctcgagactaagcaatgtatggttaatactccccaaacgaccagacgtcaccaaaataacaggaaactgatgctgagcaacgtaatcaatagtaagtaaactggtggttaagggtaccattaagccacctgcaccttctaacaatacaatttcaaaacgctcagccaatgtttgagtcgcattctcaattttttgaaaatcgatctctcggttatcaagacgcgttgctaaatgaggtgaagcaggataactaaagatttccggcatagtcagcttgtcatgatcttcctgaaaccaaccttgccccataatttcacgatgcttctggatatcctctgagatatcagcattacctgtctgaatgagtttttgggtaatcacttttttaccctgctcagtccataattttgctaaaaaacctgttgcgtaggttttaccaatttcggtatcaatcccactcacaaaatagatctggccactcatttacttcattctccgggcaatacaataaatcgggtgatatgttaaggagtacccctcagcgtgcttaaaccggtcataatcttgataaaactgctgtaaagtttgcttagtccaacgatgctgagcagttgccgttacacctgttgcttttaaatgctgcaacacggctttaggcgcatcgaaataaagctgagtttctgactgtgccaaatgcaaaatctcaaaaccagcctgagttaaggcactgttccaattttcaagattccaataatttaaaccttgtccggttagctctttaatttcaattaggtttctaggaccaaatgttgaaaagcatagccagccttgctcatttaaagcagcatagcaatgttgaagtagccgtggtaaatcttgcatccattgcaaagctgaaccggaaacaatcatattgagctgctgagggaattctaaggtttcaacgtctccaattaaccatttcacatgttcttcatgattaaagtgctgttgcacctctgcatacaaatcatttaaaactaaatcttcaatttgaaaagattcaacaagcagacgagttaaattgccagaaccgcaaccaatttcaaagacacgtgacatcgcgcttggacaaaattgcttgagtaagttcgttaagttttggcaaatttgtttttggacaattgcatgctttgaatagctttgccctgctttagcaaaacgttgggcaaccaaatctttattcaaactcacaggaaactcaccaatgcttcaagttcatgttgctcaaccattgatgttaaggaaatgcgcaaacgcgaactatttttaggtactgttggtggacgtacaggcatggcataaaaaccgctttcctgaacctgtttcgccttatcgatagtagcctgactctctcccacaatcactggaataatatggctggtcgatggactcacataccccttttgcaccactgcttgttgaagatattggctaatattttttaaatgttcacgttgagattgagccattaatacttttttaaaaataaaatttgcccatgccataacaatcggaggttgtgcggtactaaaaataagcggacgcattttattaatgagataatctttaataattggatggcaaataatataaccaccgactgcggctagcgctttacccaaggtaccaactagaaaatcaatttcctgaattacattatattgttcggcacaccctaaaccttgctgtccacgtacgccaattgaatgcgcttcatcgacatataacatggttttagcaaagcgttttttaagctggactaaagcggttaaatctgtttcatcgccatccatactaaaaatactttccgtgaccacaataattcgttcaatctggtcatcatcatgatacttttgtagaagttgctctaaatgctgaaaatcattatgtcgatagcgcacatactgggcaccagacaaacgaatcccatcaatcatactggcatgaactaacttatctgccagaattaaagttttactatcagcaacagcgggcaaaataccaatattcatatggtagccactattgaataatagagccgcccgaccaccaaatgcttggcttaggctattttccaactgttcatattcatcaaaattgcccgttaataaacgtgaagatgaagaactaaaatagctgcgttctaatggatagtaatctaaaaattcttggcgaagatcaatatcagccgccaacccaagatagtcatttgaagctaagttgagcatcgttttattttgaatcgtaataaaacggccatgctgcacattttgggtaaattgtctgaaattaccttgtcgttttaactcatctaactctgtagcaaaatgatcgagcaatgacatcttaatgtgccccctgcatcgttttaactacttcaaccaactgttcgagcaagtcacttaactcttgttgagtgatgacataaggcggcatgacataaactaattttccaaaaggacgaatccagattccacgctctacaaattgttgctgtaaagttttcatatcgacattaaaggtgagttctaccacaccaattgcaccgagcactcttacatcggcaacataatcaagctgatttaaagacattaaatattgactaagctgttgctcaattcgcttaatattggcctgccaatcttgctcaattaataattgcgtactttttaaagcaacagcacaagcgagtggattggccataaaagttgggccgtgcataaataccccagcctcaccgcgactaatggtttctgctacatgctttgtcgttaaggtcgcagataaagtcatataaccgcctgttaaccctttacctaggcacataatatctggctcaacttgagcatgttcccaagcaaagagcttacctgtacgaccaaaaccagtggcaatttcatcaaaaattaataacagatgatatttttcacaaagcgctttagcctgacgtaaatattcaggatgataaaagcgcatgccccctgcaccttggacaatcggctcaataatcagtgcagcaaggttttcatgattttgctgaatagcttgctctagctcggcaatatcttcttggttccactcttcatgaaatttggtttgcggagctgctacaaaaagacggttcggtaaacttgtaccaaaaatctgatgcatgcctgtcactggatcacaaacagacatcgcattccatgtatcaccgtgataaccagaacgtgtagtaataaaatttgttttttgtggctggccttgtgctgtccagaattgcacagccattttcaaagcaacttcaacggcaaccgaacctgaatctgcataaaaaattttatcgagactcggtggtgtaatttttaaaagaattttgccaagttcaatagcaggatcatgagttaaaccgccaaacatgatatgagacatattttgtagctggtcagtcactgcctgattaagctcagggtggttatagccatgaattgcacaccaccaagatgacataccatcaattaaagttctaccatcatcaagttcaatcgttgccccataggcacgcttcactttaaatgtaggtaaaggttgggtcattgaagtatatggatgccaaatatgttccaaatcaaaattatcggtcatcctctatacccttttacagcaattaaatctttcatttagcacatgttaaacctgttaagaatgaaagaaaattgcgagatcaatcaaagcttatgaactttgctgatgaattgttaaaaattggcagatttcttcaattgttctttccacctgtaagtagggaaaagcatgtgtagcgtcttttagcaacttataagtcatgttttctgtagcgaaatccttaaaattctctataattttgcaaggaatgacattgtcttgctcagcaaacagatgaagctgtagacccagatagtttttcaagttatctaccaagtttagctgctcaagcatttgcaaccccgctaataaaagttcatttgacggcgggtttgctatattttgtacactcatccaatcttgtttcgcttgagatgagccaagtgtaattaaataataaaaacgctttaaagtggcttgcgggttctgtaaaaaagacgctttaaattgactaaaaacatcagtaggcattgctgtttgccaattatcggtagcaacaaaacaaggattcgacgcgagcgtaattaacgttttagtttggcccgtttgtttataaaaaaagtcaaccagatatgttgctaactgtccacctaaagaccaacctacaaccacatcaatatcagttaaaaaatcaagctgctcgtgaaagtcacaacctaaaacattaaaaatattaataagttgcgtgtcatacccagctttcgttaaacctaattttaacgagtgcaaaggttctactcctactccccaacctgtaatcaataaaattttattttgtaacttcatatgcacgctcaaagacaaatttatggaaattatatattaatatcaatttaaaatatcttttaaaatcaatataaaaatcgaattcaaaaaagtaaaatcaactatttagggctgttaaatattctgaaatatattgataaataaggcctaaaatatttatatgaaatatacaaaaatttaattatctaaacattgaagcaaatcaaaaaacaacataatccacacttcacccataaatccattatgcaatgtaattaatgttaatacttatgtttttttattaaaaaaaatgactcatcaattcattttaatgttagaagattaaatattgatcaaaaaatatgggcaggcaaatatgaacaatcaaagtataatatcagatgggagagaaaaatatacatattttgttacacccaatgatattataaataccttacctacagataaaaattattgtttatttctggatattgatggaacattagctccatttcaaattcatcctgagcatagttttattccaaataccaccttagaagttataaaaaaaattattgaattaaatataccggtgattgctgtaacaggacgtgatgttgaaacagcaagtaagctacttcagtctattgaattacctatagcgggcttacatggtttagatatttattttgattctgatacttatattcgcccagatttaagcgatattaattttcaaaaattaaaagaagatattataaattcttgtgaaaaatatcctgatttattaattgaggataaagaacattctattgctttacattatcgaaaaaacccggaattagaagataatgcaatttatattatgcaacagattaaatatttttatcctcaattaaaattaaatagaggaaaatttgtcgttgaattattacctaaacaggcagataaaggtaaagcaatacaaacaatattaaatcatcttaatttaccgttaacccatcccatatttataggagatgatttaacggatgaaacaggtttcatttttattaaccaacagtttggcacttcaattaaagtaggttctggtaaaacagaagctcaatatagattaaaagatattaatagtgtttctaattttctttttttcttcctagaaaaaataaaaaagttatacgtcaaaaatagtcaagatcagaatggagaacaaatatgtctaaattaatcgtgttatcgaatcgaattagtatgccatcgggtaaggcttcagcaggtggccttgcagtagctgtacaagacgcattaaatgatagtaacggcatttggttaggctggaatggtcagcaaattaccgatactgaagcgcctgaattcgatcaggcatattctcatgggatcgactatattacctgccctcttacacatcagcaatatgcacagtactactgtggttttgccaataaagtattatggcctgccatgcatgatcgggatgacctgatcgaatataatgcagaagaatataatacctaccaaaaggtcaatcgtttatttgctgaaaaattacaacagattgctcagcctgatgatctgatttgggtgcatgactatcactttttcagcgtagctcgtcattgccgtgaattaggtatgcaaaataaaatcggtttctttttgcatattcctttcgcaagcttaaatatctggcgcaagatcccagttgcactacagttggtccaagatctttgccaatatgatgtgattggtttacaaactcaaaccgatcagaacacctgtatgcaaacttgtatgggcttacttgaagctcaaaaaatactaagcgacagaatcagttataagaaacgtcaaatcttgattaagtcctatcctatcggtgttcagccagagcttattcagcgccaagcacaacaggcctttcatacaccatacgtatttaactttgaagatataccacgtcaaaaaacaattattggggttgaccggattgattattcaaaaggtttacttgaacgtttcaatgcatttgcaactttccttgaaactaatcctgaatatcatggattggtacgtcaccttcaagttgcaacgccttcacgtacagatattccagcctatcaacgcttataccaacgctttaaggccaaattagaactgattaatgaagagtttgctcatgaagattggcgacctatcgactgttgcttcgacacagttcaacatgacagcttgatgcatatttatcgtcgttctgacatttgctggattagctcattacgtgatggtatgaatttggtcgcaaaagaatatattgcggctcaagatccagagaacccaggtgtgctgattttatctaaatatgccggtgctgctgaacaaatgactcaagcattgattgttgatccattagatagagcagccatgatggattctttaaaaaccgctctagagatgtctaaagctgaacgtattaatcgttatgaacagttaatagaaggtttagcagctactgacctgagtgattggcgaaataatttcttgaaggatttagaaaattctccgacattcacaaagtccaagttgtccttacaagaaaagtatcaacccacttaccatgtcttataataatttaagcttatggaacatcgaggatgttttactcgatgttccgcggctggtaagcaagcttagattactttgccttcacaagagtaaagcgattaagtatagcaatcatggttaataaaaccgccactcctgataagacagtggttaggctagtccactggccaatcaaaccaattaaggctgggccacttaatgaacctgtataagcaatcgttgacactaaagacagtgccgctgctttaggcatatcattttggcgtccaacacgagagaacatgactggtacaatattagaacagcctaaacctaaaagtgcataacccaatacgacaacttgccaaacaggtgccatcacaatagtgaccatagcaagagcagcgacaattgcactataagtcacaatagttttctcaccccactgttttaacaagatatgccctgcaaaacgaccacttgtcatactaagcgcgaagaaagtataagccagcccagcaaaggcaggattaagctggtatttactagttaaataaataccaccccaatccattgccgcaccttctgacaaaaaggcaataaaacacatcatcccaatcaaaaggatcgtaccgttcggacgtgaagattttttaggcgcgtcagttatttccgctgcaccttgttcatcttgctcaaatgttgttaaggcagatggaatggcaacaaagctcaccaccaataaaaccatgactacagacaatgtgctcatgagtggtgaaaggccaattgctaatagtgcagtgacaagcatggcaccgattaaaccgccaaggctacacataccatgaaaactagacatgagcgcacgtaagctgtgcttttccaccacaactgcttgtaaattaatagcaacgccaagactacctgctgccgtaccaaaaatgaataacgctacagccatcgatacaagactatgccagatcgttaaacttggtagtaataccatcaagagtatggtcgccatagcaattaatggacgacatccccaacgcttaactaaagccccagtcgcaggcatagcaatcattgagccgattcccatacaaagcagcaataaaccaaaatttgcgtgatttaggtttaaacgttgctgagcatacggaataagtggtgcccatgcagatatcgcaaagcccaagctaaaaaagctaagacgagttgctaatcgttgtgtacttaagagagtagctgtatctaaaacagcaggtttggaaaataacatatacgcgaagctcaccataaaaccattggcgatccataccaaccgattccccatagaaaaacccttgcctcattaaatttctaggcaagggtttttgttggcgaaattatatccaattccacagaaaaaacatggggtctgatacaaattttctgacttttttgtaactgccaaagccttatgtagtaaggctttgaatatattcaatttggcagaattaacatttaaacggtgacttcattttattaaaatgagccaataaaaaacccagcctaggctgggtttttcaagtcattaaatttgagactggatataattttgcaggccaatcagttcaattaaacgcaactgtttttcaagccagtaagtatggtcttcttcagtatctgataattgttgacgtaacatgtcacgactgatgtagtcgcctttttcttcacaaagtttaatacctgtcgctaatttttcacgcacatgatattcaagtgctaaatcagcttttaagcaagatacaacgtctgtaccaacattgatatcttcacgatgcatgtttggtttggcacctaaaaataatacacgacgaataatcgcatcggcgtgagacgcttcttcttgcatctcatggtcaatacgttcataaatcttgtttaagccccaatcttcatacatacgagaatggattaaatattgatcacgggcagccaactctccgccaatgagcatatttaaatagtctatgacttctggattgccacgcataataaatctcctatcgtatgagtctattatgggcaaacttaaaaatgattgcaaaacaaaaaatagttaagtttatgatttttatcaaattaaaatgagaaacatacgcatttgcagtttaagttatttaaatttcctttgcaaaaagaaacgcttgtccgatttatatgctcagacaagcgttcaaatatagcaaaaaccatcaatttataaatttgtaactaaaatcaatggttcttatttcgctaaccttttagctcaaagtttgcccatagcctgccatgagtgataagaaatctgtttcattcatgacgggaatacctaacttcgcagctttttctaattttgaacccgccttctcaccagcaactacacattttgttttgctagaaacactcccacttactcgtgcacctaatgcttgtagcatttgagtggcctgatcacgggtcatttgttctaatgtacctgtaagtacccagctttcaccatttaaaggttgacgcgttggtgctgttggtgcatcccaatgaattcctgcggcaattaaacgatcgagtacttcaatgttatgcggtgccaagaaaaagtcagcaatccactctgctgtaatatcccctacatctggggttttctttaaagcttctacattcgcagctttaagtgcctctagcgtctgaaatgtatttgctaacattctagccgttgtttcacctactccacgaatacctaatgcataaataaaacgtgctagagttgttttcttacttgcttcaatcgcatctattaggttctgtactgacttttctcccattttttcgatgcccaagagagtttctctgtgctcatgcaaatggtaaatatcagcaacatctttaagtaaatcgagacgtaataaagattctacccaacgatctcccaagccctcgatatccatcgctttacgcgatacaaagtgacgaatggcttcaatacgctgtgcggcacaatataaaccgcctgaacaacgtgcgagagcctcaccttcaggcatcactacaggcgaagcacatactgggcaggactctggtaaatgaacaacttctgcttcagcaggacggaactccggccaaactttttctactttaggaatcacgtcacccgtacgatatacacttaccgtatcgccaatgcgtacatccagacgatgaatttccccaatattatgcaacgttacgttagaaacagtcacaccacccacaaaaacagggtttaagcgtgctacaggggtcaaagtccctgtacgccctacttgccagtcaatctgctcaactgtagttaatgcagcttgtgccgggaatttataagcagttgcccagcgtggttcacgacttaagaaaccaagctgctgttgttgttttaggtcatcaaccttcaccaccatgccatcaatttcaacttgcaagtttggacgttcttgctgaatttgctcatagcgctgctgtacttcttgaattgaattacacaagtactgacgctcagcaatttggaacccaagttccgttaaccattgtaagctatcatgcatggttgtcaggccatgattcggttcacactgtgcaatcccatacgcataaaatgccaaaggtcgagcagcagcaatatttggatcaagttgtcttaaacttcctgcggctgcatttcgagggttagcgaaggttttttctccctttgcttcttggtcagcattgagtttttcaaaaccagactttggcatcaatacttcaccacgtacttcaagtagacgaggtatttcatatttttctgaatgcagaactttaggtaagttacgaatagttttaacgttttgagtaatgtcttcccccgtttcgccatccccacgggttacaccgcgaacaagtacaccattttcataccatagtgaaatcgcaaggccgtcgagttttaactcaacttcatattgtactttctggttcggaagtcgctcttctacacggcgtgcaaatgcaaataagtcttcttggttaaatacattaccaagtgaaagcatggggaccacatgcgtcacactctcaaattttgaaagcgcttgaccacctacttttgttgttggtgagtcggcttgtacaagttccggatattgttcttctaaagcttttaactgatgaaataaatgatcatattcactgtccgagattgtcggctgatccatgacatagtaggcatggttatgctttgcaatcagttgaataagctgacgcatctgttcgatcacggaagttattgccattattttattcaccataaaaaagggtggaaatttctccaccctgagctgcgactagatatattacaattatcgcaacctataccaaaaatttaaactaggctgttgcctgtgctggacgataatcaatcacatgatggcgccaatgttcttttaactgtggcgtaaattcaaggttattttcatcataaaccttaccatcaatttcacgagcaataaggcctgcaatactggtcatcatgtcaaaaccggtaacagctttgctgtttggaagtgcaaggaaaaatgctaagccttgaacttgttcagtcgataaagtttctaaatcgaaaccagcaggaccattatcagtcatacgcaatacagagaacatcaatgcactcggctcatcggtattttcatagcggtggaaacaagacatttcaccgtaacgtagaccatattttaaaagcactttcagtgctttatcacccgataacgcacggcgcggatttggatatacatttaatgcgataatctgctcagccattgctaacgcactttcgtcatcaaaacgctgctgctcatgtaaatgtacatcaagaatgttgctttcaccttcaaactcagcaatttcagcagtttcgatatttggatttaagcttaattccggctcagttttcggttgcccttctgcaacttttggttctgatgagctaacaacttctggttcagcagaaacggtatcaactaactcaactgaactattttcacttacagttgggctaacagtattttcttcagctttaacttcttctacttctactggcgtattttcaacgggtacttgtgtctggactgtttgagcttgtgaagcctgttctagttcttttgttcccttttcttctgactgtgctggctcgcttaaagttggttccactcgttcagcaacggctgctgacgcaacagtaacttctggctgttcaagttgatctcgtacatgacgagggataaccggttgattactttcaggattaatatgcaaatcactgtctagcgagggttcagcatggttcggcttttttaaaatcattcttaagccaattagcatgataataatggcaacaacgatgccaataatcgtattgatttccattctatgactccgaaactaacccgtattcttttgcctgttctaaattgacagtgactaattttgatgtacccggttcaggcatggttacacccaacaagtcagttgccatggtcatcgccagcttattatgtgtaatgtaaatgaattgtacatgttcagaaagctcttttaccaaattacaatatctctgtacattcgcatcgtcgagtggagcgtccacttcatcgagtacacaaaacggtgccggatttaacctgaaaatagcaaatactaatgctaacgctgttaacgctttttctccaccggaaagtaatgccagagaactgtttttcttacccggtggtctcgccatgagcttaaccccagattgccaatcatcctcaagacttaaactggcttcaccaccattaaaaacttttggaaatagattttgtaactcttgattaatctgatcaaaagtcgacataaacaacttacgggtttcttggtcaatgctcttcatcgcatcttttaactgagttaccgtattttccaagtcttgaatttggtggctcaactcatcaaaacgctgagaaacttcttcaaactcttgtgaagcagctaagttaactgcaccgattttttcaaactgtttctgtactttttctagtttttgctggtgttcagttaaatctattttcaaacccgtttgaagctcggcatttaactctttgagctgttcttgatagtgctcacgatccgacttggcggcttgccatgctaaacgtttggcttcaagctgctctctaagcttttcatcttgctgttggtattgatggcgttggtctgtaagcgtttgttgcttctcttggacactattaagctcaatctgccattcattccatgtcttttgcagcttttcggtttgagcaaattgttgttgaaactctgactcaaggtttggcaactctaactgaatagggtcaacaaactttttcgcctgttccatttgcgctgtaatttgttgatattggctctgcaagaacgaaatatctttttcaagcagctcaatttgttgagttgtctgcgtactattacgtcgtaaaatctcacgttcttgttgttgctgttgtaagacttgttgctgttcctcaagctgctctgttaattcttctacctgaaattgcaaagttttatagtcaggtaaaatagtttcgagcttcattgccaatgcatgcaaatcaatttcaagatcatctttttgcatcgcatcttcttcaagctgcgtatctaattgagcgagttgatctttcaattgctgtttttgcaataaaaatgcttgtgctgcggtttgttgcttggcaatttgtacatcaagctgttgcaagtctttttgtttttgtttaatgacttgttgtttttgctgtaggtcaacttgtaactgtcctagctcatctttttgctgaactataatttgatctaatgcttgtaattctggttgctgcttttgaagaacttgttcaatttcgtctagacgaatacgatgactgagcataccttgcgcactttgactttcgtcatcatacataagagcaattacccaatcttgcccgacatgataaccatctaaagtcaaaatagactggccatattgcagttgtttttgttcatttaaagcatgagataaatcttgtgcaatcgctacattcgagaatattgatagctgtggcgatgcaatccaatcattcaagcaaatcaggttccccttaaatttgcttgattgctctgaaggctttaactggcgagcaactccttcctgaaaggcttgttcagtttcaacaatatgtgcctgcaaccattttgctaaaaacttttcaataatttgtgcgtgtggtttgccctgctctgttaactctagagcctgcattaaacgtagcgtatcttggttttgctttggactttgtttagcaacaagctggcttaagtttttctgctctgataataaaacctgtatttctgtttttaacgtttgctgctggtttttatttacctgatgcgcttgttgagcttgttcaatacgctgcacatactgctcaatttcagcttctagcgttgagatttcacgacaaagctgctgctgtaattgctcaagctcgccttgttcatcttcgtgtacttgcgattggatctggtttgcttgatgttgcagcgtttctttttgctgttcaatgcgctgaacatttttgcctaattgctcgatttgagcagacatttgcattttttgctgctgttgtttttcaacctgagcttttacttgctcaaattgttgctgcgcttgccgttgctgtgattgtaaacctgcaaaactttgctctgcttcagctgctgtatgctcaattgcagttaaagcttcggtttgctcttctaactggctattcagtgtttcgagttgcaattcagaaagctgtaaacgttctttagtttgggctttttgctgttctaactgaacgagagttgtactattttgctgaaataaactttgtttttgctctagagtcattttcagttcagacagtttcttttcagcttgttgccattcttgttgtaacggtgaagattgctgaataagtctctgaaataaagcactggtagattctaaatcatgttcaatcgtacttaattctgaacgaactaatttaaatgtttcccccagttcgttcatttgaacggtatattcttcttgtaggcgtacacttttctctgcctgaaaagacaaaatttcaatttttagggtacgaatctggctttctaatgttttatattgaaccgctgcttctgactggcgtttaagcgttttaagttgtgattttaactcaagcgcaatatcttccaagcgtgaaaggttttgctccgtatgttcaaggtgctgcaaggtttcgcggcgacgcgcctgataacgggaaacacctgccgcctcttcaatgaaaatacgcatttcttctggcttggcatcaaccaagcggttaatcatgccttgttcaatgactgcgtaagagcgtggccctaaccctgtgcccaagaaaatgtcagtaatatcacggcggcgacaacgtgtaccatttaagaaatactcagatttaccttcgcgggtcacctgacgacgaactgcgagctcattataagcattataagctccacctaatttgccataggtattgtcaaaacgcagttctacactggcaacaccaactggcttacgcttggatgttccggtaaaaataacatcttgcatgctaccaccacgcagctgacgagcgtttgactcccccatcacccagcggatcgcatcaataacattggatttgccacaaccatttggaccaaccactgctgtgcggttcgccttaaaatttaaagttgtactatctgcaaaagatttaaagccggaaagttttaaactgcttaaacgcataatgccctaactagcggcgtgagcgtctcgcccaagccaattcaatctgtttcattcgtgtcagcgattccaacacaaggttacgtaagtgtcgacaaaaatcttccataaataaagcggcttgttgtgattttcggatcaaaattgcatcagtcacgagtttaaataatgcaaatgcttcttgtagttcccgtttagaggtatttagcgtcaaaaaataactacgacgtaatgatggtaataattctttataaaatttcattaaataaggattaccgaccatatcttgctgttcagcaagatattggaaaatagcatcgtagaatttttcaatatcgcctgcttttacatgctcaagaagctgttctaacaagagttgtaattgatcggcttcatgagcacgccatgtttcgcttatgcgttgtacaatatgccccaataacatcatatttgtatcaaacaacgctttgacctgttgtgccgacatttccgaaacaattgcaccacgacgcggaaaaatttcaatgagatgcgtacgctcgagtaataatagcgcctcacgaactgatcccctacttacgtcaagttctttagcgatacgaagctcttgtatgcgttcgccttcaaccaattcgccactaataatctgttcgctaatgtatttgacaatttgctcagaaagactttctgtctcttcgagattcataaatcacccgctactttttatatgcattaatccatgcttttctttcgcatccttgtttttaactgatcccatccattaaaaactatgtcattgtctgacaattttattgcattttaagccaacccacccaaaatccatacagaaatcggatgaaaaactcacctttaatcttttcaagtcttcaaataaaaaagcttaaaccgtgagagtctaagctttcttttctatatatttttaataaaacgtttttaattcataaaacctttataaataaagtaactgccgaccacgactaacaagcaagcaaagcatttttttagcatttgtggtgacaatgcgtgggcaaccttagccccaagtttagcagtgacaaaactcatgacactaataccaataaaagcgtagatatggatatatccaatcgtattaggtacagaaatgtgctctttagcaccaaaccacataaaaccaattgcacctgcaatagcaataggtaaaccacaagcagcagaggtcgcaactgctttttgcatgactacgccatgacggtttaaatatgggacagttaagcttccgcctccaataccaaaaattgcagaggcaataccaatgcctccacctgccataaattgcataggggttgaaggaagctgacgtgttgggtcaaccacaacatgggctcctttgaacatccgataagccatcacaacagcaaagacaccaataagaagctgtaaatgctgtccagacaaaaggtcggcaatacctgcacctaaaaaggaaccaatcactagtcccggtgctaaattacgaaaaacaggccagaggactgcaccttttttatgatgagccgaaactgaactaaaggaagtcacaataatggttgctagggaggttccgactgcaatatgcatgattacagcgggatcatagtgcaactgggtaaaaacgacatagaggattggtacaataattagtccaccaccaactccaaacagtccggcagtaaaaccagcaattgcgccaatgagtaaatatatgattaactccataaatgttttaccactctgctcatattcaacatggatttagagactcgccaactacaacaacttttaagcgcaaaaaaccagcttccagaagtggttttattaaaagcaaccacaacttcgaccaatgatgatattcgtgaaattgcccaaaaaggcattacaacaggcttggtttgcagtgctcaacaaactcaagggcgaggtcaacatcaacggcaatggatttcacctgaaggaaacatttatttaagcacattggtgcaaactcgaacacccttagatggtcgcttagcacttgaagttgcgttaaatattttgcaaattccacagctacaacctttgagcctacaagtgaaatggccaaatgatttgtatagtacacaaggaaaatggggcggaattttggttgaacctctttcccaatatcaggcgattgtgggtgtaggtattaatttaaaaacaccaccagtcactgatagtgatcaaccgatcacgtctctagaagatttaggcctagagcaaatgagtcgtcttgagttaatttcagagctttatgttgcaattcaaaatgcagcccgctggtttgaacatggttgttataaccttgcaggacgttttaaccaccatgctgcatggcttaatcagttagttcagttcgaacatagtcaaggactggtatatggccgtttcgttggaatctctaatgaaggtgcagtgattcttgaaactcctgaaccacagcagttttatcaaggtcgtctaagaccacaaaccactcagtaatcaggtatttttcccatgaaaagtttatggcttgatatcggaaacacccgtttaaaatactggattactgaaaatcagcaaattattgaacatgcagctgagttacatttgcagtctcctgccgatttattactgggattaatccaacactttaaacatcaaggcttgcatcgtattgggatttcttcggttctcgataccgaaaataatcagcgtattcagcaaattctaaaatggctagaaattcctgttgtttttgccaaagtgcatgctgaatatgcaggtttacaatgtggttatgaagttccaagtcagctcgggattgaccgctggctacaggtacttgctgttgctgaggaaaaagaaaactattgcattattggttgtggaacagcgcttaccattgatttaacgaaaggtaagcaacatttaggcggttatattctgccaaacctttatttacaacgtgatgcactgattcaaaataccaaaggtattaaaattcctgattcggcttttgataatctaaatccgggtaataacaccgtagatgcagtacatcatggtattttgttaggcctgattagtacaattgaaagcatcatgcagcaatctcctaaaaagctgctgctgactggtggtgatgcaaaactatttgccaagtttttacaaaaatatgatcctgttgtagaaaccgatcttttgctcaaaggattacagcaatatattgctcattatcctaaagactaaaatacagaacaaaataaaaggcgctatatgcgccttttattttatggatttatttcttttggtcattattaccaaacagtggtcccataccgccgccaccgccaaattgtttttgcatattgcctaatgaacgcatcattttgctcataccagatggattcgcaaacttcttcatcattttagccatttgtgcttgttgcttaatgagtttattcacttcagctacatccataccacacccagctgcaatacgttttttacggcttgggttcatcaggtctggattacggcgttccttgatggtcattgactggataatagcttccattttcttgacctgcttttcaggattcgcctgctcaattgcttgctgaattcctgcactgctcatgcctggcaacttgtctaagaagcccatcatgccgcccatcttcttcatttgctcaaattgcatcagcatatcttcaaagttgaagctgccacctttttgcaattttttcgccattttctcggctttttctttgtcgattttacgttcaacttcttcgactaaagaaagtacgtcacccatacctaaaatacgttgagcaacacggtccggatggaatggttctaaagcatcaagcttttcgcccatacctaagaacttaattggcttaccggtaatagcacgcacagaaagtgccgcaccaccacgcgcatcaccatcagttttagtaagaatcacacctgtaagcgctaaagcatcgttaaatgctttagcagtatttgcagcatcctgacctgtcatggcatcaaccacaaacaaggtttcagtcggcttaactgctgcatgcaattctttaatttcgtccatcatgtcttcatcgacatgcaaacgacccgctgtatcgacaatcaacacatcagcaaactggatttttgcctgttcaattgcacggttaacaatatcaattggtttttcagaaggatctgatggaataaagcctgcaccaacttctgctgacacagtttctaactgtttaatcgctgccggacgataaacgtcggcagaaacggtcattacttttttcttttgacgttcttttaagaaacgtgccagcttggctgctgtagttgttttacctgcaccttgtaaaccagcaagtaataccacaactggaggcttagcacttaaatccagtgtttcattggcctcacccatcatcttggtgagttcatcatagacaatttttacaaatgcctggcctggagataactgagtcatcacttcttggcccaatgcctcttccttaactttcgcgataaattcacgagttacaggtaacgcgacatcggcttcaagaagagccatacgtacttcacgtaaggtatctttaatattgtcttcggtcagctgccctgagccagtaacatttcttaaactctgcgtgagtcgttctgttaaggtatcaaacattgcaaaatccgcttaaaatggctagttgcaaaaaaatctttctcgaaatagaaaatttatgcatagaatgctataggatactttagttcgcagcgaatttatatcttatctagatgaattaatcctgaaaaaggtttgacatgattagcctccccttggtttacacaattttggcactcatcgcatataccacttctttctggtatctgttcatacgtttaatgtcaaaacgtgaaccaaacccatggttatttgcttttgttacgaccttagcactgctgttacatggcacagttttatgtcatgccatgctgacgccatcaggaattaactacgatgtttttaatctggtgtcttttacatcaggacttatgttgttgttaagcttagtttttagtactttccgcccgattgtaccgttaaacttgctcggcattcctgtagcggcgattggtcttattttaggttttgcatttagccgtcccgatcagtttattgaacagcattcattaggtttagatactcatattattctttcactttctgcttatgctgttttactgatggcaaccatacatgcgatcttgatatggttccaaaaccgtgaactcaaaaagaaacaaaaaaacgtatttgggtcaatttacttccatccattcaggccatggagtctttattatttgacctcatcattactggttttattttattaactattgctctcgcgtttggtttcttaacagttgatagcttctttgcccagcatctcgctcataaaaccgtatttagtattatttcatggtttatttatggctctttattgattggccactataaacttggctggcgcggacaaaaagcgattcgttttaccttaattggttttgcattattagcgatcggttttattggcagtaaatttgtgcttgagatgatattgggccgataaaacaattaaaatttcagcactactagacagcgttatacatatcccgtataacgctgtttttgttttgctcaggtgactcagactgtgaaactcatactcgctccaatggaaggtttaactgacccgatcatgcgggatacactcacatctgttggtcacttcgactggtgtgtaaccgagtttattcgcgttacagacagtattttgccagaccatatttactatagtttttgtcctgaacttaaaaacgatggtaaaacagctgctggaacacctgtacacgttcagttcttaggcaataatccagagatgcttgcagcaaatgcggcaaaagtcgttgagctgggtgctcctgcaattgaccttaattttggttgtcctgcaaaaaccgtcaatcgacatcgaggtggttcggtacttcttgatgaaccagacgtagtacatatgctcattaaagcagtccgtgatgctgtacctgcgcacatccctgtttcagcaaaaatgcgtttaggttatctagatgaaaaccacaccatggaaaacgcccatgctgttgaagatgcgggtgcaagctggttaacagtacatgctcgaactaaagcagatggttatacgccaccagcttattgggaaaaaattctaccgattaaagaagctttaaaaattaatgtgattgctaacggcgaaatctggaccaatgctgatgctagagcttgccagcaacaatctggctgtgaagatttaatgattggccgtggtgcagtgactactccagatttaacacaatgtattcgccaaaatatggatgaagcactgtttacttgggaacaactggttgacttacaaatacgttttttaaatggtcaagcaaaaacagaaattgggatggttggccgttataagcagtggttaggtatgatgaccaaagcctatcctcaagcgaaagaattatgggaccaagtgaaacgcattaaagctttagatgaaattgttcagcagctagagcaaaccagttcttctcgtatttaatcactcaaacaaaagagagcgattgtttaaacaaccgccctcttttggtatttcaggttaagtaattattaattattttttaaaagccacttactttcattttaaagtcggtcaccgaagcacccgtaactccaaaactccccatagacccattgggtaaattattaaatgttgttgtactttgtgtacctaaatttcctaaagtcacattgttaagtgatgcatcaaatttactagatacacctatatttccaaaggtaagtcctgtcgggtcaaccccagcataaaatccatcaagaacaaaacccgttgacgcattcgtacctgcaaatttaaacccaaatgtagcacccgtgttatctgaaactaaagtaatcgggcagccagatgcagcagaacaaatcgattgaatagctcctccgaatttaaccataaccgactgagcagcatgtcccagttgaatatttaaacggggcttattggtttgtacaaagttaatatcaagattaccagtagaacgaatcagctcttttaccccggtattcaccgttgtgcccgaactaaaaattgattttggtgcataacttgttaatgcataatcggatgggctagacaaagatgtacttggtgctaaataaactgaaaatggtaaaagccgaataccatttacgtcactccccatcgtgacagctaaatttaaaaatggatttccaccaccagcatcggtatcgattgcaatattaaaagaaggatttgtagatacagcagctttaataaactctatgccaggaaccggattagtagagtttcctgcaatgacaagacctgctttactgttgtaagacgtagatgcaataccgttcgtatcaatcaaggcgacttgattaaatttaacttgatcggcctgaatacctaaagttagaccattttgacccgtcgcagctgcaagactttgatcatctaaaggctgcatcgcaaaaacacttgaactactggcaaataataaccagcagactatatttttatttttcatgtcgctctaatccttaagagacaaacgtttattatttgttcagactatcagaataatattcaagtacaaagcaattatctctataacccgacgaatgcaaatccaatcacactaaactaaaatttatataaaaaagtgacgttaaacgtcacttttattgattagttaaaggcgccatttctaggcacaatgctaaagctgctatttagacgtccacccgtaattgcaagctcacctaaacgtgctcctgcacctgttgaaggtggatagaaattaatatctttcacacgtaatgcgccgtcaatactcttatcaggattaaaataaaccgcggtatttacaccaactttacctaaaccacttgcggtatctttgcccacaactaaagcggtattaaacgctagctttccagtaatattgtcaaaaccaattgcagaaccatcaatcgggtcgctaatttgtacagtattaccagttgctgtcgcaggcattgtaaaatcacctagtacagttaaagcactaccatctgcaattgaactattcggcactatcgataaattaagatcgccgcctaaacgtagttttaaaccaaataagacatcattatttttggcaaagttatcgattggcgaagtacaagacccggttgccggacaagttttatatttagctcctggtaaataacctgctgcaatttcggttgataaagcaagtaacatatcttttaaaccgatatttaaactgccattttctaaaccaatagtgccattgcctttgaggaacatatcaatattacgtaaccccatataataatcggtagggttgcccgcattattagcatttggagaaccatcaattaataaaattgaagttgttttagtaccgcctgcatctcgacctgtcgttcctacagctataccaaaacctaaacgtgaagttgtaccagatgttgcaactaaattttgaatcggtttaccgttggcatcttttgtatagtaataagcaccatttgcaggcgcatctacaccatagacagcggcattcgcatttaaattataaaaaggtaatgccaaaccccactggttatttaaaccattatctgcaaattgattggcagcagcgacatttgcactggtagtaaaacgacctcgtcttgagaatgcctggaactctgctccacgcatggcaagaattaggctaaatggatttgtaaccgtatcacggtggatattatgttgataatcggcagcagttgttaaagtgcctgatcctaaacgaattgcatttagtgttgcgttatttggcattaataaggtttttgtatcagcaagatttagataaatatttccgctgtcaaaataaccgcgtgtagccgagttcagccccgttaaattaccgaattcaaaaccataagcattcagacctgcaccaccaatttccaaggtagttgctttaccatctgaacctaacatcgaatcattatctttagtgaactcccctttcatacgaaaggcaattccagagttacctaaaatactattacttgatcccgtacctgaagctgtattagcagtacctaatgttgttttatctgaagagccatccataccacggacttgtaagtaactattgaccatacggccgctagcacctaaacgaatcaagcctttagaattctgtgggctatttgtcgtgtctagggcataaggatttgacttatcaacatttgagctaagcattacctcaatattcagacctgaattggttactttcccactactgtctacatatgtaccagcagttaaaccagaagcagaatcggcgacacgattaaaatcgacatagccataggtactatttggagtttgcccaaccgcagcagtattattccctgtattagtttgtaagactatgccacgggtaggatcaataaacatgacgcctttaccaacaaaattaaagttaaaattctttaatatcaattgatttagctgactacgcgcgtctaattgccctaaataaatatttgcattatttagaccaagcgtcatgcttgactgactattcgggctaaataaaccatcttgagtagtaagagccaagtttaaaggcgaagttgtttgtatagccaactgtcctaaagtaggtgaacaagcagccgaactattacagactttgacgctatttacagtaatgagcgagggactactttgaatagaaaaatcgacccctgctttacctgtagtcgcattacttcctacgtctaaacggtagtttgtacctaaagcttgtgtagaggcattacttttttgtatttttacaccactcgcttgagctcttaaaatttgatcagcacttgttggtgtgcctgcatggtcgtcccaataagcattatcaatattgatttcgttgaaagtcgtttgtatcgagattccatcttgaccattgaccgcactcaaatcggcatctgttaacgcttctaaagcaaaaacctgtccgctcactaacaacatactggctgttaatgtatttaaaataaactttgagccgtgactttctttatttttgttcatcacttcagttcctttgaaatctacattaacctttaacaacgtggatggctaccatcacagctaaagaccatgacttttccttgaattgctaagttgccattcatcattaagcccataaatcctgtttcacgaccgtagtcatacgccgatggggttgcagtagccacttgctggttcgcactattagcagtcgctgcataagttggctttttgaaatatgcataatcatacatatttgcactcgagccttgcgttgttgttgagctcgtaaagttatcttgctcaattgacagagcattaaaaccaaaattacgaattaaaattggctgtgctgcactaaaactcagttgaatagccggttttataatttcagtattacttttatcaagatactttaaatcagcaccatctaaacccattttttgaatatttaaagtgccttgcacacctttaaatactaaccaaagtttattaccgctgtcgctattttcagtccaaccacttggcttagtcgcgtctgtttgcacaaagcgtttattaattgctaaaccaatatgacagaactctacgttttcacaaacgccgccactgccattatcaaatatgccgttactggtctggtttaaattaagcatcaaagataaatcagcaccagcttggccattaattgcctgtaatgcatcattatccaaggtttgcaattctgcatgagtcacagttgcacaaagagcaaagagtaaagcagttatttttttcatcgcgttactcctcttatagaccttttgtggtgagctttaaatgttgaattaaaacaccatcaataacagctgaccccatgttattactaattgaagagctaatttgtgctcctgataatttatatgtgtttatatctgcatttggtgtagtcgtataccaacgtccattattgtaaagtgcatcaggtaaaggtgtaccatttggtacaacaaattgagccccattccctgcatctgtggtggtgtaccctgtcgtgttggttgtcggattataataagcagtactatcaatattcgcccagtttgctccttgagaatcaaatcttaagcctgagccagcatttcctgtccagcctgttgccgtacggtattgccaatcataacaagtaaaaattaaactacatgtatagctgtttacacgacgttcttgattttgtaattgatagaagtttctagtttgtgttgtagcagtaacagttcctgtcggtaatttcccaaaagaaatacctacagcatcttgagcattattccctttaaatgcctctagagtattagtcgttgcattataaacagtagaaccaatcgagatactactatgtgttgcgttagaaccttgataggttttaccacctaaggttacattggcaccacattggtaaacattacaggtggagccgaggtaactactatctgttccagtatagtcagtataaattttcttatagatttctggtttattcggaatacgcgctagttccaaactaaagtttttaccatctgaactcaaaactaaaggttgatataaagaccctaatacaagattaatattagggttataaagatataaaccttcgtttgcatcaaaggttggtgcaagccccccattaatagcgggagtaattaaattcccctgtccagtaccagattcacgagtacttaaacgtaatacattattcatagcgctatcagttggtgcagtccatgaacctgttgaagtaatagtagtcgtttgactacgaatacgatataaccaatctgaactaggggaattattgctaggcgctccagtatattgagtactataacgatttacccatggtcctactgtagatgttggggtatttgcagtaattgttgctcttaaattagttgcatcgccactatttaaacgtacaacacccgcaaaacctaaagtattgttataaaatggactcaaaccatttgcggatgttgcaccacccaaagtttggaagagctgtagacggctaccatttaaactaaaattattccaaataccttgcagacgtaaacgattcgcgcggcttgcatcagtactcgtgccgatcaaaccattagagtcaccatagttaaattgatctgttgcaccatttattttatttggattacgaacaaaaatatctgaccataaacctaatttaagtttataggcatcaagtccagcagtatctcttgtccctacttcatataaaggcgcttctaaagctaaataggttacttggcaagttggatcagctgctccactacaatttgttgcactgaaattaggcacagagttttctgtcgcaactttaaaaatccacggattaatagctgtaccccaactcgaaattgcagctgctgtatcggtagaagcaagacgggtatttgtatcgttatctgatttagaaagagctaagccataaagaaaaatatcagctttacctactgcacggtccccagagtcgatcgtaccgtttttattcgtatctgcagcagtcatacttaaaggcccaacaggcacataattaatataacctgtatctttagtacgatccgttaaaatttgattggtggtttcgttcgctccagctccgcgcaataccatgtaagtattttgaggtaaaatagcaataccttcaccagtagtttcactcaaaccagcatcagagagttcttcaagagcgaaactcgattggcttatacaaagcccaattaaagttgccaaaacggttttttgaaaccttaccgtataattaagtgtagtcatcttgaccttcctgttttatacgatgccgtgcaccatatttatttttctttaacaatccttgatgctaggtgaagccatccttttcaccttagaccagaagacaaatccagctagatattgccaacctttccacatttctattatgcggaatatttgcacaaatgcaaaaaaaagcatgtaaaaatttacttttccgatgaatgtaaaatagtaatagcaaccttctcagcatttaacaaaaagttaaacctgagccatggcagtttggtttaaagttttgattggttaactgtaaattacttaaatttaaagtaagaggactattttttaaatcaactgtactaatattcacatccaagtcacccagttttaacaaaccacccaaatcagaagtttgcgcagggttagcttgtaaatatgcagaaacagcagctgaaatttgtggaaatagtggtgaaatatcaatcgcatcttgaggaataatattaccaatattaaccgggtctgcaaaagacatccaccaacccttttgagctacgtcatctgcttttgcaccaggccactgtaacatttgattttgtagagctaaatacattggcgagttaatcggtaaattatgaatgagacctaatgactgagttaaatttaaatttgcagtaatatttgaaattgtcccgttcatatatacattagaaaatttcgagcctttacctgctacagcacaagctaacacagaacaatctgttaccgttgcttcaaccttacctccttgagtataaatacctgtcggttcaggataagctggatcatgtggtcctgctgcattatattgtaccgtaccatctactgggtacgagctactgtgacctacataaatattaggaactttaactggtgcagataaaacctttgagctaacccggttaccattaacttgaataggagcaatttcgaagtagttattttgaatacctggaatattaaagcctccatttgaagtaataaaactaacctctgcaaatcctcccaagcctaaagcttgtaaacgtcccgttacagcatttgcgccatataaattatctcgcgtagcagaagttgttgcataacctttaatcaaaccactactatcggactgaaccttcatataacccgaaatagagttgatcccattcggggtggttgtattttcagtacctgctgttaatagtccaataaatttttcagcacttagtcttaaaccaactacttcacgtgttgatgctgagtttggattcttaacagcaaactcaatgaatggattggttaaaacagccgaagatgaggcacgatcttcattagacataggtagcggattaccattggcatcaaaattctgtccacttaaacttaaattatcaatatcaatatcacagccacccgcaccatttacaccaccacaacccaactgtagtttacgaatattagtattgatttctaactcggcttccattcctaatttataaaaaccaatattactgctattgtcacgtagtttttctaaatttgcagagtcagtaggtgcgatataagacatactcattaatgcctgaccacgagtagctgacaactcagcatcagacattggaactaatgtagaaccagcataagctgaagaaaagcataaacttccgagtgctaatatcgcaacctgaagagacgtaaactgtcgcatgaccgacctccgtatccttgggggcataatctaatttctttttatttggcttctttttctttaatgtactcttaaactaaatacataagaaaaataccgatatttacgatttcgcttctttttaatttgtgtgatccacatcaaagaaaaaaatcaattcttgatcattttatatcattttctacaaaagaaaacgtaccttattaatattccgataaacgtcactttttaaggtatatataaaaaataggccacttaaagtgacccatttttaaagctcatctatttttaacaacttatgtcttaggaagtgtaaccccagtttggccttggtatttaccaccacgatctttataagaggtctcgcatacttcatcactttcgaagaatagcatttgtgctaccccttcacccgcataaatacgcgcaggcaagttcgtggtatttgaaaattctaaagtaacgtgtccttcccattctggctctaaaggagtgacatttacaataataccgcaacgtgcataagttgatttaccaaggcacacagtcaaaacattacgtggaatacggaaatattcaattgtacgcgctagagcaaatgagttaggcggaataatacaaacgtcagactcaatatcgataaaacttttttcatcgaaattttttggatcaacaattgcagaatgtacgttagtgaaaactttaaattcgcgggcacagcgtacgtcataaccatagctagagaccccgtaggaaatcaatttttcgccattcttatcaaaacggacttgattctctgcataaggttcaatcatgccgtgtttttcgctcatctcgcgaatccaacgatcagacttaatagccatgtattttctatccaaaaggtaatttcattgattgcgacgtactttaacgtaaaaaagcaattatgaaaacaatggcggctactcttatcgctaagaatagcccggaataaatttttaaagatttaataaagcagaatagctaattggaattgagaaactaactaaaaccaacgaagctgttctttgtaaatttgattgatttaaccaacgtactttatttgcagccaagactgaccctaaaaaaatccagaataaggcaatcggggtaattaaagctaaataagccagcatatgaatgagataaatatgaaaattagtccacgctgcaacagggaaaatcgctgaagcaaaaagtaatgccttaggatttagtaaagttgcacaaaataattcacgtgggcgaatagttggctgatctaattcaagctgttgatttgccgtgtgccataatttaattgctaaaaaaataatataacaagcactgagcaatttaagtagaggaggtaataaaggaagcgttgcagaaactttcccgattaacattccccaagctgaaatcgaaatcacataccctagaacttctgccggaattaatttagcagattttttgaggcctacttgtactcctgatgatgcaagtaaagtatttgttgggccaggggtaagtaaaatagtggcaaccaagccaataaaaagccatgaaatcattgaatgacctcacaatgtagtcatctcagattaatagatattattctagaaggcaaaatctaattgtaagacaattttttaacatcttaagaaataaaatttaaaaattatttataaacaataatttattaaaattttattaattctaagctaaaaaactattgagtcagtcacagcgttttacgtaccaaattgtatttaagtaatataagtatttttattttaaatctatttttacattaaaaaggcctataataaattattaccgcagtaagtttaatttttaagcttttaataagtttcaattaatatattgtttctttgtgtttatatgagctcctaagctctactatcctatgattatggcaaaacaattttttcaatcttggcttccttctccagagaaagttacaaatatgaaatttttaaggattttcgggcaaaaaacccttaatcctgtgctttggtatgtcaaccgtaaatctattactcgcgccatttttgtagggacttttttcggtttactgcctataccctttcatagtgtatttattgttatggcagttttactgtttgaagttaatttacctattagtttaatgcttgcttggctcagcaatcctcttacattagcacctattttatatattggtttctggtttggtgcccatatttatcatgtgcatatgataaataagaaaatgcttttaggggtgcttcatcagatttcacgttggattacgcattttggtcatggtcatatcgatttgagcctcgctaaaattttaatatcaggtctcattgtcgaagcgtttgtatttgcaaccatactatatatagtgactgagattttctggcgttggatggtcattcgaaactggaaaaatagaacaggacataaaaaacaagaagacgctctataagaattcatcttcttgcctaaaattaaattgttattttggtagtttagatttcatatattcttcagctacgttaagcacgtagtcttggcaagcttctcctgtaccagggtcataagctccattattggtaatattattagataaaattcgaattcctaaaaacggaacattaaactggcttgcaatttgtgcaacagaagccgcttccatttcttcaactgaggtaccataacgctcatggaaaaattgaattcggtcaagttcattattccacacatctgccgagccaatcgttccttcaaccacttcacctttatcataacgtactttatgtgccgccattaatagctcttggtcaccttcaaatttacgaattgcaataggttcagggtcagattcatctgttggtaagacatcaaaagcctcaacccatgtaagtgagtttgaacctccacctaatggctgtttaggcgttctaaaagcgccaatattggttgcatattttcctaaaacgatatcgtaaacatggagatcaggatcgtgcccccctgctgttccctggttaataatggcaatcggtttataccgttcaattgccaaagcagttgcggcagcagagttactcatccccatacgtgttttagaaataatcattggatagccattgtaggttcctttccaaaaggtccagccacctattttttcaacagttttattttctaactttgaagccattctttccgactctacgggtaaagcaccctgaataataatcggctgtaatttctgtttttgttcctgaactgttggtgtttgtgaaactgatgagttgtcatcattacatccaactaaaaataaagcgctacataaactgattacgcccaaactatacttaaattgcattttccacctgtttctttgaaaaagaagcgtaaagtagcaatctgcatgccaatttcaagtttagctttgttatttagattcagtaatttaaatttttcttttaaccagccaataaaaaacccgacttaaagtcgggtcagatgaatcaaaagattcgtttgtcatctcgtgcacgctgagggatttttttaatctgttgccacactgctttcgcaatatcgatataactatcagctgcatcatccattgcaacaacactcggtttaccttgatcagcatgctcacgtatttgagcatttaaaggcaaacgacctagcaatggaatatgatattgctcggaaagcttatcaccaccaccgataccaaaaatttgctcttcatgaccacagtttgaacaaatgtgggtcgacatgttctcaacgacacctaataccggaataccaactttattaaacaactcgattcctttagtcgcatcaagcaaagcaacattttgtggggtcgtcacaatgattgagccagtcactggaatacgctgtgcaagcgtcagctgaatatcgcctgtacccggtggcatatcaatcatgagtacatctaaatctggccaaagcgtttgattaaataattgcattagagcgcctgtagctttcggcccacgccatgcaacaggtgtgttgttatcgccagttagatgtccaatagaaagtacagccataccgtaagcatctaacggtacaaaattttcactttcaataagaggagttttaccagcattacctagcatggtcgggatacttggcccatagatatcagcatctaataccccaaccttaagtcccattttttgtaaggcaagcgccaaattgaccgttgttgtcgatttaccaacaccacctttacctgatgaaactaaaataacattcttgattcgaggatgaagtggcacatctctttgttgcggcgctgctttctgaattggtgggttatttggatccggttcagacttaggtgaagcatcaagcacaggaggtaggtttgaattttctttcggtgctttagatgaacaactttgacccgaactctcttgtgtagggcgcttttgttgaactacatgtaaattaagttcttcaataccgcacttttgcaaagcaccagctaaatcatcatgaatttgctgcaagtattctttttcgtctgggaaagtattaatggtgagttgtaaaacacgaccttgcacttgaagctgactaatgcgctcttttaaagcatcttttgaatctggcaataaataattttggagtacggtttggatttcctcttctttcacttcttgtgcgggtgaaaaaacggattttaatgaagaaagccaagacatattgtttactccaaaaacagatcattacagcttaatggagatagtgtaacagtattgctccgcactcgctcaccttgggatgaataattactaacttcagaactcatcttttaggtaaggagtacggattttagtttaaatcagcttattcagcagaatcatgatttttcaatttattaagtttttcggtagctgttttcttcaactcatcaaattttgcagttgcttgagtttttaactcatcaaattttgtagccgcctcttcctttaattctgcagctttggctttagcatcatcaagtttatgcgctgcttcagtacgtaaatggtcaaacttatcttgcaggctatgctgagcatcatcaagtttgcctttcaaatcattagctttatcttcaactgcctcttttgcagcagcttgtttttcttttacattttcctttaaatcttccaaggctttttcaccttgtacttttgcatcggccgctttggtctttagctcatctactttatctgcaactgcttctttacccgcagtttgtttctcttttacattttcttttaaatcgtccaaagctttttcaccttgtacttttgcatcagccgcttttgcctttaattcatctaatttattttcagtagtcatcgttgttatcctcatcgttaattaaaaaaattacctgaataagttattagttatacatcgttatggcttattttctgaccgtaactgcaatttgaaacaaagacaatacaggaagattcaaatattttttgatttgtttatctgttctaaagagaaataacttctggctttaagtccatttttatagatacctcttatatttagtcaaagattattaatctttgcttatcttcctgcatcagttaaaatcttccaccttataaatacgaatgagagaatgagatccgtgcgtaaaattttagtcaccaatgccctcccttatgccaatggtccaattcatatgggtcatttactcggttatatccaggcagacatctgggttcgtgccatgcgggcaatgggtcatgacgtgacttatgtatgtgcggatgatgctcacggtacagcaattatgctacgtgccgaagcaaatggtattagcccagaagagcaaatcgcgaatgttcaaaaagaacacattcgtgattttgatggttttggcgtacatttcgatcattatgattcaactcatagtgatgcgaacaaagctcgttcaacagatatctatattaaaaaccgtgaagctggcaatattgcagtccgacctgtaactcaattatttgatccggaaaaaggtatgttcttatctgaccgtttcattaagggtacttgcccaaaatgtaagtcagaagatcaatacggcgactcatgtgaagtatgtggtacaacttataatgcgactgagttactcaatccgcgttcgactttaagtggtgcaacaccagttgaaaaatcatcagatcactatttcttcaagctcccaaactttgctgaatatttgcaaaaatggacccgcgatgaaggtcgcttacctctttcaattgctaacaaattggatgaatggtttgaagcaggtttagcagactgggatatttctcgtgatgctccttattttggttttgaaattccggatgcaccgaataaatatttctatgtgtgggtagatgccccaatcggttatatgtctagttttgaaaactatatcaaaactaagcgcccagatttaaactttgatgatttctggaagaaagatagtcaaaatgaggtttaccactttattggtaaagacattgtttacttccatgctttattctggcctgcgatgcttgaaggggcgaactatcgcactccaacaggcttattcgtaaatggtttcttgactgtaaatggacaaaaaatgtctaagtctcgcggtactttcattaaagccgagacatacttacaacatctaaacccagagtatttacgctattactttgcttctaaactttcagataaagttgaagactctgacttgaaccttgatgactttgttcagaaagtaaattcagatttagtgggtaaagtggttaatattgctagtcgctgtgctaagtttattaacagcagttttaacaatacgctatcaagtacatgtgctgaatctgacttagtacaaagctttattgatgctggtgattcaattgctgctgcatatgaagcgcgtgaattctctacggcgatccgtgaaattatggcgcttgctgaccgcgcaaaccaatatattgatgagaaaaaaccttgggctctggctaaacaagaaggtcaagaacaacaagttcttgatgtatgctctgtcggtatcaacttattccgtcaattagcagtgtacttagctccagtactgccaactttagctcagcaagttcaagatttcttaaaacttgaaagcttcgatttcgagtcacgtaaacaaattcttgtaagccatgagattgcacagttccaacctcttatgcagcgtgttgatccaaaagctgttgcagccatggttgatgcttctaaagagtctttaggtgctcctgctccacaagcaactaaatcagcgaaaaaagagaaatctgccgagaaaaaagcagcccctactccagcagttggtgaagctgaaattattggtattgaagacttcttaaaagttgacttacgtgttgctcaggtcgttgaggcaggtacagttgagggttcagataaattacttcaattgacgttagacgtaggtgaagctgaaccacgtaatgtatttagtggtattcgtagtcaatatgcgccagaagacctaaaaggaaaattggtcgttatggtggctaaccttgcaccacgtaaaatgcgttttggtatttcaaacggtatggtacttgctgccggaaatggtgaaggtattttcattatttcaccagatagcggtgcaaaacctggcgataaagtttcttaatccgcctacatataaaaaaagctccctacattgggagcttttttatttctaacctactttttaaaataagcaggcttatctacactgagtacatttaaagtgctatatgtgagacattctatccatcaattaataattagattgctcatgattattggcttgtaaatcgggaattttgtagtctttttcataaaccggagaaccagcaatactcatcgcccgttcatttgaaggttgctgtttacttgttgttctcatctcacatcctgtagttaagatgaaaaaaacaaccgaaatgctcaccattagttttttcataacgtgatcctcatttctttttgttttattaattaagttaccactttttaaatatttaagtgctaaaaaagatatttcaatttgtatatattttgcgcaaaaataaagccagactacaaagagttggctttatattttttagatattttaattaaagatttatcatttgaagaagattaactttaagcccaatacgctaacaatgcttccagccactcggtcaacacccgtttttgcttttaaatacatttttcgaggcttctctgaagataaaagcattgctacacatgagtaccaacctgcatcaatcataaaacaaatgagcggtaatgcgacgtagtaataatttggaatttcttttggcagtaaagcagtaaaaacactcgctagtacaacagcaattttcggattacttaactgagtaatcaaaccatatcggtaggcttgtttataagtcattttcgatttggcatcattttccatggcaattggttctttggcatgtttaataattttaaaagcaagccaaagcaaatacagcccaccaccaatttttaaaattagataagctgaaggcactgccaataaaactgcctgtaaccccataactgctaaaaagccaaaaagagctgcacccgtgcccgtccctaatgccgtaaacaagccatgtttacgtgatttagatattgaattttgcgccacataaataaagcttggcccaggacttattgctccaagcatcaatgccatcgcaattgaaaaaagaggaataagggactcaaacattgtattgacctaacatcatgcaattgcgcgatattctagcagctttttatgacacatataaaaatggaaaagagataaattataaaaattgaattttcatgtttttacaatttagctattcacaacggacaaaaatgtccgttaaatatatcatctttaaattttccaaatcagtgacatgagtaaacgtcaaaaaattgcagcccataatcgggatgaattactcaatgcagccgaggaatgctttcgtattcatggtattaatgtccctctacaagtcgtgattgaccatgcaggtgtaggtagagcgacgttctaccgcaacttttgtgaccgaaaggctttaattagcgcccttttagagcgtgcgattacacagctagagcaaaaagctgctcattttcaacaattcgaagatggtttatttcgtttaattgaaggacatattgcacaacttcccaagctcgcaattttacaagatttttggagagtgattgatcgacaagatccaattatgctaaaaatttatgaacggcgaaataatgcacttaagccactgattgaaaatgcaatagaacaaaaactgtgccgagctgatctaactgctgatgactatgcaatggtcacagcaatgttgggttcttcatttcaaggacatgaacctgaagaacagacccgcttagcgaaacgagcaattgaattactatttcatggtattcaagtacaaaaaattcgagggatagaatgagtaaaacgcctcgttatttagaaacgccacctgactggacaccagaagaacaaccgactttacctggttcgccagcagcgattgcgcattctgtacctaagcgatttctttatttttttattggtctgtttgtcgctatttcagcaagcttaagtaatggtttcattacggcaaatttgcccttaatccaaggtgagtatggcctgacaccttctgaagccgcttggcttcctgctgcttatgtaatggccaatgtcagttcgaatctgattttgtttaaagctaggcaacaatatggtctgagagtcttttcagaaataggacttgttatttttattgccgtgctggttttgcacatttttgtgcatacctatgaaatggccttgttcgctcgggttgtagcaggtttagctggcgcaccacttagctctttaggtatgtattacaccatgcaagcttttaaaaaagccgacatggcaaaaggtatatatattgcctttggttttcagcagttaggtgtaccgctcgcctggattatttccccttttcttgtgagtacagacagttggtctgttctttacacctttgaactcggcttagcactttgttgtttagcaatggtggtttctttgaaattaccacgtagcttacgaatctatgttttcgaaaaacaggatttcttcacctttgctttactggcgccaggttttgcatgtctatgtattgtgctgacacaaggcccaatcttgtggtggtttaacagtgaatggcttgcttatgtattaattgcaggttttagcttagttgttttaggtttgatctatgaacattatcgtgccaatccattaattatgacacgttggttaggcgcctcctcaaccctacgctttatctttggtgcttttgccattcgtcttttaatgtcagaacaaagttatgcagccgttaatttcctaaaaactatgggaatgggtccagaccaatttgttccactctatgtggtcatattggtggggattttaagcggaactctatttagtgcgcttactttctcgcgtgaacgaattatttttcacttactttttgcagagtttttgattctcattgcctgtggactagattatcaccttacgagcgatgtacggccttcaaacttctttgcaagccagtttttagtaggctttgccggcggcctgtttatcggtcctttacttctaattggatttgcgcaaactttggctaaaggtccttcgtatgtagtgacttttattgtcttattctctgcaacccaaacatttggtggccttgttggctcatcttttttctcgacctatcaacaacatcgtacacaaaactatcaagtcgagattattaaagatttggaacaagctgacccactagttgctcaaaggctttctacctatcaacgtagtgcagccatcacaacaaatgaccccgcattacaaacagctcagtctatgcgctcacttaatcaagtggttactcgtgaagctcaggtccgtgcttacaatgatgtgattgcattaaacggtatttttgccgtcgccttactcttatggggcggatttaatattgcacgtagtaaatacctacaacgcagaggaattagccgcccttaacggcttatgttattgatgaaatagaaattgagattgatatatgtcagatgatcaaaataaaccggaacaaacccctgctcaaacatctaataatgagccaacgcctgcacctgcacctgcacctgcacctgcacctgcaagtaaactgattccgacaaaacgctcaaccctattatggatgttgggtgtgcttattatcggtattttagtgattttgtgggcatggagaattgggccttttgccacaagtgtgcagcaaactgacaatagttatgttaaaggtaaaactaccattttatcctcgcaaattaatggctatgttaaagatgtattggtaaaagactttgaccatgttaaaaagggtcaagtattaatgcatattgatgccaccacttatgaccaaaaagtagcacaagcggcttcaggggtagaacaggccaaaaatactttagccaatcaaactcagtcaattgctcaaaaacaagcagatattgtggctgcgcaggctaaagtagaacaagtcagggctcaatatgaactttctttagcacagcttagacgctatcaacagctagggaatagtggagcagcttctaaatctgagcaagataaagccgctgctgatgccgaaaataatcttgcagcccttaaacaggcagaggccaatgttctagttgccaaagaagcacttaaaacagctcaagtcgcagaagcaggcttagaagcacaagtttccagtgctaaagcacagttagaccaagctcaaaccaccaaagactatagtgttattgttgctccaatggatggacaacttggtgaagtaaaccctcgtgttgggcaatatgtggccgcaggatcacagttactctatctgattccacagcaaacttgggtgattgccaactttaaagaaacccaaattgccaatatgcgaattggacaaaaagcgtggtttacagtcgatgcaatgaaacataaaaaatttacaggtcatgttgaacaaatctctccggccgcgggttccgagttcagtgtactaaaaccggataatgcaacaggaaactttaccaaagtcgttcaacggattgccgtgcgtattaccattgacccaaatcaggaaggaatggaacacttacgccctggtatgtcagtgattacttctgtcgacacaagctcttaatcagctttttaaaaacctctttaaaaaagctacaatgtgatcaatcattatttttctcaatttctaatgtttgatcacattgcccaacctatctcctatcagcacgttgaactatccttccctgttcatctcgacattaaacgtttagatttagttcatcctcaaatttcgggtaataagtttttcaaattaaaatacaatttgcttgctgcaaaagaacaaggtttatcaagcattttgacttttggtggggcttactcaaatcatattgctgcaacagcttatgcagctcatctttttggtttaaaaagtataggaattattcgtggtgaagagttagctggtaaatcacttaatcccaccttggcaaaagctcaaagtttaggaatgcagctacattttgtctctcgccatgaatatcgcttacgagatgaagcaaattaccttaaacaattacagcaacaatttccgcagacctatatcattcccgaaggtggttccaatgaactggcagttcaaggttgtcaggaaatcctgagccaatatgacttagagcaatatgatgtgatttgctgtgcagtcggaactggcggaacgatttcaggtctgattgaaagaagtgcagcacatcagaaagtcttaggattttcggctttaaaaggtaatttcttacaacaagagattaggcaatggactaaaaaacaaaattggtctttgacagatgtatactgctggggcggttatgcgaaaacctcacctgaactattcgcatttattgaaaattttgaagagcaatatacggtcccccttgaaccgatttataccggaaaaatgatgtttggtctgtttgatcttataaaaaacaattattttccagcgaatacacgcattttggcaattcattccggtggtttacaagccgatattagaaatagacctcacgcataactcacccgcttttagaaggccttatcccttacctgtataaatgtccttagcatgagtaagtgctggcatgatagtatatgcccctttttaatttttacgactaatcgagaacttcttatgtctaacagtcatgtcgatgtcattgtcttaggtgcaggtgcttctggactcatgttggctgcacatgctgctaaacggggacgttcggtcttaattttagaaaaagccaataaaattggtaaaaagattttaatgtcaggcggtgggaaatgtaactttaccaacctctatgtagaacctgaaaactatatttctcataatccgcactttgttatttctgccctatcacgctatagcaactgggactttattggtctggtctgtgattatggaattgcctatgaagaacgtaaacacgggcaattatttacgctaaacggcgctaaagaaattttagagatgttggtgagtgagtgtaataaaacaaacaatgtcgaaatccagacccattgtgaggttggacaagtcgatccattagaacaaggtggtttttcagtacacaccaatcagggccgttttagctgtgaatcattagtggttgctacaggtggattatccatcccaactttaggtggctctggttttggctatgaattggcacaaaaatttggacatacagttttcccaacccgtgctggtttagtaccatttactttttcagatcatattaaagaagtcactacacgcctaagtggtaatgctttagatgtgactctaactaactcgaagaatagctttactgaagcattattatttacgcatcgtggtttgagtggtccaagttctttacagctttcaaactattggaatacaggtgaaagttttaaaatcgactttttcccgagccaagatttagcaacttatttaaaagataaaaagaaagcccaacctaaagttttactgcgtactcttctgaacgaatttacggcaaaaagtatcgtacaagagttacaacaacttatatggccagagcagagcgagacagcaattggtaatatcagtgatgcacagctagatcatattgccgagcagctacatggttttattgttaaaccatcaggcacagaaggatatcgtactgctgaagttaccttaggtggaattgatacaactgaagtttcatctaaaacactcgaaagcaaaaagcagaaaggactatactttattggagaagtacttgatgtgactggccacttaggaggctataacttccaatgggcttggtcttcggcttatgcagcagcacaatatgtttaaatgatgaataagctaatttgatgcttttgaatcattggatgatttttcagaatcatgcttatggcttgttgtctgttttgatgattcagatttgctaaatacaaatttataagcacttgctaaaaaaccaacggtaatcccagcaattacaacaggtgctaaaaaacgaccaggttttttcatcgtattttcctcacttatttgtttttatagctgtccaagacagaacgaccactcaatatagagtggtcgaacttatcacaaaaatcaaagattttttgtactgtttatctgaaaattagttacacctactaaatttcatcattttcgccagtagaaccaaacggtttatttactggtggttgtgatggatttacttgtgcagaatcagctggttttgcatcagatgaaactgttgttgatggtgcagttgtagtcgttgacggagttgaaaccgtagtcgaactacctgttgtcttattattagtaggcggttgatataaaggatttggttgacttgcctctttcttagctttatccagtaaatcagataaaagtctttctgctggttgacgcccccccaaaccaaatgcaagagcgaaagcaactgcaactgcgcctagcgttaagccgaacgcaaggtttacgatcgaatcggcaatacccatcgctcttaaaccaagtgcaaggactaaaccaataatcaagacacgaaccaaactacctaaccaacgcgaactattatattcaccgcgttgaacaacgttcgccacaacatttgcaagccagaaaccaatcaccaagattacagcgcccaatagaatgtttgcaccgaaatggataaacattgcgattagaccactaatctgatcgaaaccaagacggtcagcagcttcagaaactgcaaacaacatggtaaagaacacgattagccaaccaacggcattagaaactttagtttgacctaaaaagcgttgtacatctaattttgctggaatttcatcaacaccagttcctgcaattaactcagcaaccaagcgaccaacaaaacgtgaaacaatataagcaaccagtaaaattaaaccagcagcaataatgtttggaatagcttgtaaaatttcattgagcattgctgttgctggctgagaaatagtctcaatacctaaagcttcaaatgctacaatcaatgtcgtaataatgatgatggcaaaaacaaatgaacctaagaatttgcctacatttgaatttttgaaaagaccaattttttccgcttgagattgcacacctaagctattaattaatccttcaacaataccgcgtacaatttttgccaagatataaccaacaaaaacgataacgccagcaataaagatatttggtaagaatgctacagcatcatttaccatattttgaaccggaatcagtaagcctgttaatcctaagattgaaagaacaatcggaaggaaaagtaacaatacaagccagtaaagaatttcaccaatattctggctaattccccctacacccacttcgctgcttaacttatcatcaagttgagttcgggataaaacattggtcacccccgcccgcaccagtcgagcaacgatccagccaataaaacccaccactacagcagcaataatatttggtatatagacgagtacctgattaaccatgttgctaaatggaccgctcactccactaatgttgagcacatttaaagcagcaacaacggcgagaatcagaataaaccagaatacgactttggagatcagaccttctatattgggtgtacgtccagtcgctgaagataatttcgcattggtatttactttttgcagaagtttttttacacctgccgccaccaataaagcgatgatccagcctaccagtaagatgacaattgcagctaaaataggatgaaactgatcccagtaatacatcgcatcaaactgagcgccgcgaggcccattaaaaaattcattcatattgttatgtcctcaattgttatgttcttttcagtgttatcactaaatgaaaaacaccagttcgttgtaaaaaatgacgataaatgcggtctatgtcaccttatgttttgaatatttttcaatcaacaaccttctgcataaatacaacaaattgatgcaaaagattgcaaaaaaagccttcaggtcacatcctaaaggctttttatcacgatatactggttagcttattacccttcataggtcttcaaatcagaagtaccactgatgacttgtggtatggtctcatgttgaaaagcggcttcctcttttggcgttttgctgtgatcagcaaccatataaaccacaagtgcgagaagaaaaagcccaacaataattaaaatataaactggcaatcttcttttttttgcagtctcttccggactcgtcacatgaggcggttttgaaaaatcatgcatcttctttcccctcttctattatcattaactttatattcatcataacaatttgatttgttgcattgtgtgaaaaagcattatgagaaggtgtctacggttgcaaaactctacttttaaaaatattaatttagtataaaatttagccgctttaattataacgttttagaatctaacttctcgatattcagaatcttcactaaagtccgatttgtaatacaatatgttttagcccttactttttataaaataggctataataagcccccttgttttaaagctactcaattttatgatgtatcgtcagcaaagcgtaactcttgatctcgacactgacgtcacacatcaatgttatttgcatcagacaagagatgaccatctcattggtattattgaatttaataaaccaagttatgaactcaaatggggtgatcttgaatatttccgtcgccgcaccgaagagttctcggtcatgccatttcctgaatgcattaatgcgatgattgttgatattcgtaatatcaatgtatttctggacaatgaagttccaattttaccgtggcgtttactcgaagaagattgtcctgttcgcctagttgttcctcaagaccgccttgaacactatgcgggattatttgaaccaacatggctttcaacagatgtcgacagtgcgattgcagagatccgtgagtttatggatatgtttgtccattaataaacatatccataaaaaattttcttaaaatattttacttcctgtttttaccagtaattttctaccgcaatatttccttcaccacgacgattcattgtaagaccacggcgttttagagcctctttcgtatcatcaaccatttgtgggtttccacaaagcatgacatgacttgatgctgggctgagttctaagcctgctactttttctagctcaccattttcgattaacacgggtaagcgttcatgtaacggtgcagatggatctcgggtaatgataggaataaatttaaaacctaaatgtccttccccaaaagtttcagcaatctcttgaatacggtcaacataagccagctcagccgcagtacgaacactgtaaaccaagttaattttctggtaattagaccaagtttcaaagtcttgtagcatcgacaaaaatggagccaagcctgtacctgttgccagtaaccacagatcatgcggtaaaggctgttgatagcgtgccaacgtcaggtaaccatatggaattttttccaaataaagctcatcaccgactttcaaatgctgtagattcgaggtgaaggcaccgtctggtactacaattgagaaaaactctagcgtttcatcaaacggagaagacaccaccgaatacgcacggacaaccagctcatctcctacctttaaaccaatacgcgcaaattgccctgccgtaaatttaaaatgcgaaggacgcgtcatggtaaaactgaaaagtgttggggtccaacgatgaacagataaaactttttctacgctaaatttttcaattgacatgatttcaacgtggcatgaaatagtgcgctcatgttagcatgacagccgaaataatgaatacttttaaacgttaaggctttttaaacatgcggatgacattacgccagttggctgtttttgtagcagtcgcccaagaaggaaccgttactaaagccagtgatgcggtcagactgacgcaaagtgcagcaagtatggctttagccgatttagaagacggcttaggtgctcctttatttgatcgtttaggtaagcgcttgcagctaaatgatcttggacgttttctgcttccccaagcattagaaattttaggccgctgtgaagcctttgaacaagcagccaagggtgagttacagagtattgaccttcgtatcggggctactttaaccatcagtgattatctcatgccagatttaatggctaacttcttacaacgtcatccacaagcacatttacaacttcaagttggtaacacacgccaaatgattgaagctgtaaatcagtttcagcttgatttagctttaattgaagggtcttgtcacttacctcaactccaatgtattcactggcgtgacgatgagctagcagtgtgctgctcacctgaccacccgttaacacgtttaaatcgcccacttacccctcaagattttcatgacgtagaatggatattacgtgaagaaggttcaggtactcgtgaagtctttgataatgcaattttgcaagatttaccagatgcaaacattcgtttgacgcttggacataacgaagcgatcttaaaaatagtggctggtggtttaggaatgtcgtgtatttcaaagttagcgattgaacctttaagtgaaaaaggtcaacttgttattttagataccccattttggcaacttacccgccctctttatatgctagtgcaccgccaaaaatatcaaggtccgggccttaaagcatttttaaaattttgcgatgaagatcaggcttaaagcttgatcttcacattcattagcggcggaaattagacaataactcacttgtgatcgctttattgtgatcagcaattttagttttcttagtcttcgcaggattaggatcaatacgctcaatcttaacagctttaaattttcctcgattatctgcagcaagaaatctcactttttcatttcttttcggttcaccttcggatgcaggaaaatcagaaatatgaaagaaaatatctccttcagtcgtcgaaataaaaccaaatcctttatcggcgttatattgttttacccttccagtataaaactcttgcttcatgatttttctccctactttcccaatgcaattactgtagtaaataaaaagagactttcatgtccgctcttaaaagttatacggcttaatgaagtctctttttatcgttatttcaaaaattagtctttttgaacactaccaaaaatcttgtcaccagcatcgcctaaacctggaacaatataaccatgttcatttaagccattgtcaatagatgcagtataaagctgaatatcaggatgtgctgcctctactttcgcgattccttcaggtgctgcaactaacaccataacacggatatctttacatccacttgcctttaatacatcaatagcagcaactaaagaattacctgttgccaacattggatcaatgatcatggcaatacggttagcgacatcaggaactaactttttatagtaagtacgtacttctagagttgcttcatcacgctcaagccctaacacacttacttttgcacttggaattaggttaagcacaccatcaagcataccgatacctgcacgcaaaatcggtacaatcgttatttttttacccgcgatacgctgagtagtaacattgccagcccaaccttcaatctcacaatccacaactggtaagtctttcgtcgcttcatatgtcaataacatagtcacttcctgagcaagctcacggaaattcttggtactgatgtcagcacgacgtaataaacctaatttatgacgaataagtgggtgacgaatttcttgaatggccacagatgttacctaaaaatataaaaacgtatttattataatctttttttaactatcaataaaaaaaagcctccatatttggaggcttttttgtacacaagaattattgttgctgtgaaagcatgaaatgtaatggagataaaatttctgcttttaatgccaaattaatcattggatctggataaacacccaaaataataactaatgcagcagcagccaataccattaaaccacccactttttgtccccaatgtgcatcagcatcaatacgaggagtttcaggtggagtcatatacataacaaccatcacacgtaagtagtaatacaaaccaataccactacccacaataatcattgcagctaagaaccagtgttgagttgttacagcagccataacaaccaagaacttaccaatgaagcctgctgttaatggaataccagccaaagataacatcatgactgttaatgttgctgtaagtactggacggcgccagaacaaaccacggtagtctgcaaggctttgcgcttcatctacgttgttatatgggctagacattaacgctactgcaccaaaagcaccaatagtcgttaatacataagtcaccacatacacagttacgctgcccaagcttgcatatgtcatgctgattaaagcaattaacaaataaccaaagtgagcaatagatgaataacccaaaatacgctttaagttgacctgacgaacagcaagcaagttaccgactaaaattgacaataccgcaatgattgtcaaaacagtcactagcgagttcaccatgattgcgccagaagcaagcaaataacgtacgaacaaaccaattgttgcaactttagcagcagtcgccaagaacgttgccattggagccggtgcacctgcatatacatctggtgtccatttatggaacggtgcaagcgacaatttgaatgcaacagcgaaaataataagtgctaaacctaataacaccattggctgtttgattgcaccaaataaagcttgtacagaatcatagaatgaaagcgaaccagtgtaagcatagatatacgccatccccatcaacaacattgcagaagctgttgcagaaagcacaagatacttaatccctgcttcaagcgactgactacgttgatatgtataagcaagtaagccgtatacaggaatcgacattaactcaaggctaatgaagaatgatgcatagtgtgaacttgcaaccatcaacattgcacctgctacagaagcaagtaacaaaagatagagttcttcgcggttgtctttataagtctcaatatatgcatgagacaaagtacagcaagccaatgatgcaactaaaatcatgaattgatagaacatggtaaatggatcaaccataaacatgcccatcacatttgccggcacaaatttaccgccaaataattctaataagatataaagtgcagcaaggtttaaaccgacaacagaggttgttgcgattaaattatggttacgcttaattgaaattaacagcatgacgacgactgctgtcaaagcaacaatcatcactggtgctaaaggcataagcgtagaaaatgatactgtgaagttcatgattattggatctccacatggtcaagttgagtagctgtttgctgaacagtttcaacgacttcttgtactggtacataactattgaccaaccactgcatgcttgaatgagatacatccaagaatgtttgtggatagataccaagccaaacgagaccaatcgcacaaatcatcaaaatactaacttcacgagcagataagtcttttaatggactagtgtagtgttgcttttgttcagagtttggttcaccaaacaaagcacggtgaatcaagatcaaaccatacaaacctgcaaatacaaggctgatagaagcaatgatcgtgaatacaggatatttattaaatgaacccatcaaaatcaggaattcaccaataaagttacctaaacctggcacaccaacaagagctgcgacgaagaacattaagaagaacggtaaatactggagctgaccacgaagaccacccatcaaacgtaaatcacgtgtatgtaagcgctcgtagatttgaccagacataatgaacaatgcagctgatgacaaaccatgtgccaacatcatgatcattagaccttggaaggtcaaaatattacctgcataaatagcaagtaaaacgaagcccatatgtgaaatcgacgtatacgcaagtaaacgtttcatgtcagtttgctggtaagcacaccacgcgccgtagaaaataccaatcaaaccgaaaataattgcaatatctgcaaactgtgcagaagctgccgggaagaatggaattacaaaacgaagcaaaccgtacgctgctgttttaatcaagatacccgccaagtctacagaacccgctgtaggtgcttgagcatgggcatccggtaaccagccatgcaatgggaaaactggtaacttcactgcaaaaccaataaagaagcagatcatgaaaccatacgcgaagccagcaggtaaacgattcgctacagctaataaatagttgtaatcaaaaccgatcataccagtcatcatgtaaccataaaccacaaggccaaggataccgattaacattactaaaccagcgatttgcgtatataagaagaacttggttgcagcgtaaacacgtgaacgaccgtttgaacccttatgaccccataacgcaatcaagaagtagattggtacaagcatcatctcccagaagaagaagaataggaacaaatcaattgccaagaacacgccgataacgccccctaaactccataacaagtttaagtggaagaaaccaacattcttttggatctcaccccatgaacaaccaacagcaagtacaccaagtaaagctgttaataacaccatgagtaaagacaagccatctactgctaggtgaatgccaataccgagagattgaatccacggtaagtaaaactcagctgtccaagttgggacttttgagcctaactcgtagctataagtaccactttgccaaagtgcaagacctaagcccaacgtgatgagcataccaattaaggcgatccaacgtggcaaagttttgtcgagtttatcgactaaccaacaagtaaaacctgcaatgaacggaacaaggatcagcgcgggtaaaattaaattgttttccattttatttccccactacctgaataacgatcaagatcatcaataacaccactacaccgagtgacatgcttgatgcgtattcacgcaatgaacctgtttgacgtgagctggtgaaactgtttccgcctttaacaagcgcaggaagaacaagccataagctgtcaatcggatcacgaccaaatagtttggcgaagaataaataaggtttaacaaaaacgatgtcatacaacgcatcgaaaccaaatgcagtacgacaaatatgagctaagccagcaccaagacttgtttttgcaaacgattttactgcaccgtaagcaaatgcaaatagaccaataccaacagctaaaccaacaagcgcgatacctactgctaaatgctctgccccatgcatgccttcaacaaattgttcagcaacatggaattcaggaatttttgccgtattcaaaatatttgctaccggagcttttaatgcagcgcccacaaaagtagacaatacggccaagatacctaatggagcccagtaagtagcacctttaatctcatggtaatgtgtattttctttaccgaagaatacaacccagattaaacggaaggtatagattgaagtcaggaatgcacctgctacaccagcccaatataagctgttatataaagcaatcgattgaccttgtacccaaacctcaccaagaatcgcgtctttagagaagaagccgatagttaagaatgggatagctgctaatgcaccgccaccaatcgcaaaacatgcaaataggaatttgtttttgtagaacaaaccacccattttgaaaatattttgttcgtgatggtaagcaagaataactgcaccagaagacaagaataataatgctttgaagaatgcgtgagccaacatgtggaacaagccagcttgatacgcttcagcacctacagccataaacatataaccaagctgactcatagttgagtaagccaaaatacgtttgatgtctgtttgtacgagagcagcaaagcctgcaactaataaagttacagcccctgttaccgaaatgaattgcatcacttcaggcgcaagttcaaatacgctgaatagacgacagcacaagtacacaccagctgttaccattgttgctgcgtggattaatgcagaaacaggtgtaggacctgccatagcatctgctaaccatgtttgcaatggaatttgtgcagatttaccagcagcacccaagaacaacattaatgcagtccagatggtaagtgacgaactcttcgtcattacttctgctgcgtgttcaacgatatactgagtattaagcgtaccaaattgttggtaaagcaagaataaagcgataagtaagaatacgtcacctacacgggtaactgtaaatgctttgatcgctgcccaaccatttgcagggtttgcataatagaaaccaatcagcaagtaagagcatagacctacgccttcccaacctaagaataacaacgctaagttgtcacccaacacaagcaaaagcatgcttgcaacgaacaggttgaagtaagagaagaagcgcgcatacccttcttcaccacgcatgtaccatgatgcaaagatgtggattaggaaaccaacacccgtgatcatgcccatcatgagtaaagataagccatctaaatgtaagctaatgccaggcgcgaaaccaccaacattaaaccacgtccaaagattttgaacaaaaacttgctggccgctactggtaaatgccataccagcaatcaatgcaaataatgcagataaacctacagaacctacaccaataattgctgcaacattttcagagagcttatcacgcccagccgccaataaaataaaaccgattagcggaaataatactgttagatataaataactcatccgcgcatctcactagcagcatccacatccaaatgatggaagcgatgatagaactgaaggacaatcgcaagaccgatacacgcctctgccgcagcaagggttaaaatcagaatgaacatgacttgtccatctggttgtgcccatacgctacccgcaagaacaaatgctaacgctgcagcattcatcatgatctcaaggctcattaacataaatagtaggttgcgtcgcaccattacaccgtaaaaaccgagtgcaaaaagaatggttgcaacaatcaaaccatgttctaaagggatctggcccattattctttttcctcttctgcacctggttcacgtttacctaagtggtatgctgcaacaagggctgctagcaataacatcgcggcaacttcaaccaacaataaatagtgtgtaaagagcgcttgaccaacaacttttggtccaattacttgtgctccaagtggtgcagagatggttgtatattcaccaccaagcatccaaactaaaagtaagccaagtaaaaagctcatgagtgctggatatgcccaagcatccgaagaaagccatttacgctcttgttcaactgtgtgttgccctaagttaagcatcatcacaacgaatacgaacaagaccataatcgcaccagcataaacaatgatttcgagggcgccggcaaacggcgcacctacgatcatgaaaataccagcaacagcaagcaatgaaacaatcagactaagcaatgcatgtacagggttcgtgttagtcactacacgaaccgtagaaacgatggccacgagcgccatcaaataaaacggccacatcatggtaatagactccgtacatcgattggtgcactttctttttgtgcttgacctttctctttaccgttaattgccataccagttacacggtagaagttatagtctgggtatttacctggacctgaaatgagcaagttttctttctcatatacgaggtcttgacgtacgtattcgcccaactcgaaatctggagttagctgaatcgctgtagttggacatgcttcttcacacataccgcagaagatacaacgagagaagttgatacggaaaaattccggataccaacgtccgtcttctttttcagctttttgcagtgaaatacagccaaccggacatgcaaccgcacaaaggttacatgccacacaacgctcttccccgtccgggtcacgtgtcaagataatacgaccacgatagcgaggtggtacaatttcctctgctggtacttctggataaagaattgtgtcacgtttacggaaaccatgggtaaataccatgaataacgtccgaacgattgacccaactccagctagaattttatacattttgtactccctgctgtcttaggcctgattcatcagaatcacagcaccagttaccaataggttaaccaacgccagcggcaaacaaattttccaaccgaagttcatgacttggtcgtaacgtggacgcattaaagaaccacgtgccaatacaaacatcattacgaagaatgctgttttaatcacaaaccagaacactggtggaacaaatggaatttctaaattgaatggagctaaccagccaccaaagaataaagtcacgatcaatgcagagataagtacaacgtttacatattcagcaacgaagaacataccccatttcataccgccatattcaacatggtaaccttcggccaattcttgttctgcttcaggttggtcaaatgggtgacggtgagttaccgcaacacctgcaacaacgaaaatcaagaaacctaagaactgtggaatgatgaaccaaacatcacgttgagcttcaacaatttcacgaaggttaaatgaaccagcgattgcaaccacacccattagcgagatacccaagaacacttcataagaaattgtttgagcagctgaacgcaaaccaccgagtaatgaatatttgttatttgatgaccaaccaccgaataacactgcataaaccgcaataccagccattgccataaagaacaacaaaccgatgctcatgtccgcaacacccaatgcagggcttacaggaataaccatgaacgaaagcaccgcagttgccatcgcaactgccggagctaaacggaaagttaatttatcagcaaattttggtgtccagtcttctttgaacatgatcttaagcatgtcggcaacgatctggaacataccaccaggaccaacacggtttggaccataacggtcttgccaccaagcaagcaaacgacgctcaatgaaagacatcaacgctgcaacaagaacaacaacaagcaaaatcacaactgcttgaacaacagcgtaagcaattggccagttctcagcccaaagtggcgtttgacgtataatttcttgattcatgaattacactcctaatgccactgaaacaggttcagctaaagatactgtcggagctaaaccaactgggtaaccaatataacctgtaggtaaatattcgattacttgtacaggtaagctcacagttgtttcgcctgcttttactgtaatacgttggccttcttgtagattcaaacgtgttgcgtcttgttcgcccacagcaaacacagcttcaggaatacgagtttccattgcaggtgttttaattgtgaattcgccagaaccaaagatatggtgcattggtacaagacggaagctttcaggatttgcaactacagctgttggagcgacatagctacgtgctggacgttttgctaaacggtcgaataaacgaacgcctgaatcaccaccttttaagtgaccacccacttcatcttggtatttgttccaagattgtggagagttccaacctggcgcccacgcaaatggtacaagcgaagaagctttttgcggaccaacataaccttccatagagaatgttaatgctgagtctggatctgtcggttgtttaggttcatgaactgataaaggcgcacgcattgctgtacgaccagaataacgacgtggttcacgagcaattttcaaaccatgtacacggtagccagcgtctggtgcaacatcttgaattgcttcaagtaccggaacgttcttcacgattgtttcgattacgtcgtcaagtactgtccaatcaattggtttgcctttaaggccagtttcaatggcatgcaaccaacgccaagattctttaatcgcgtattcaggtttgtagtagcttggatcgtaaacttggtagaagcgttgtgcacgaccttcttggcttacgacagtaccatcaccttcggcaaagcttgctgctgaaagtacaatatcagcctgtttcacagtttcagtttcactatgatcaagcacgattactgtttcagctttatcaagtgctgctttaacttgagcggccggtaaacgacggaataagtcattttcaacaataacaagtgtgtcgtagtcttgagcaaatgcttgttcaaggcttaagccaccaaataatgccaagcccatagagttcacttcaggaacaacaaggcttaaaccagcttttgagccaaggttttgcgttaactctgctgctgcctccataattgaagcatcttgcaagctcgtacccgcaataattaacggtttgtttgctgcttttaaagtgtcggcaatagtttgagcaaatgcttttgcatcatcatctaaaccattaactgtttcgcctttaactgccgcagcaactgcaaaacctaatcgcgcaatatcatttggagatgcaacaacttcaccagtcgcaacatccgcaaggcgagtttgagttgcagccaagatatagatcggagatttcgcttcctgaccaatacgttgtacaggctcagccaaccagtccggtgtacgtgtttttgcagccatttcgcgagctttgttttttgcagcttgacgaactgacaatgccatacgtggagcagtttgagttaaatcttcacccaaaattaatactgcatcgtagctttcaatttcacgcatattcgggttgtaaatgccctctgtttgcatgattgaagcagcaagttcaacgaggctttgctctttttgtgcaacacctgttgagtagtttgcttgacctactagttcacgcaatgcgtaatttgattctaagcttgcacgtggcgaaccgatacctagaacttttttaccttcaagtttcgcaattgtttggtccaacgcttggtcaacagaaacagtagctactgtttcgccattacggaactgaggttgacgtggacgatctgcacggtttacataacctgtgccaaaacggcctttgtcacaaaggaagtattggttaaccgaaccattgaaacggttttctacacgacggatttcgccataacgctcacccggagagatgttacaacctgaagaacagccatgacacacgcttggtgcatattgcatatcccatttacggttatagcgctctgaatgagtcttatcggtaaatacaccagttggacatacttcagtcaagttaccagagaattcagactctaaagtacctgattctggacgaccaaagtaaacacgtgatgcattggcatatacaccaaagtctgtaccgcctgcataatctttgtagtaacgaacacaacgataacaagcaatacaacggttcatttcatgtgcaatgaatgagcctagttcttggttgtaatgtgtacgcttagtaaaacgatagcgacgacggtcgtgacctgtcattacagtcatatcttgtaaatgacagtgaccaccctcttcacacactggacagtcgtgtgggtggttggtcattaagaactcaacaatagattcacggaaatctaccgcttctttgtcttcaatcgaaatataggtattgtcagatgctggtgtcatacatgacatcacaagacgtccgcgcgtatcttcaggatttgcatactgagttacggcacattgacgacatgaaccaacagaacctaaggatgggtgccaacaaaaatacggaatatcaatgccaagggataaacatgcttgtagcaagttttctgatccattgacttcgtacgattttccatcgacatgaattgtagccatagtcgaatcccttaagcttgttctacgttgctagtttgcacgacaggacgatcagtcactttcgcttcaaactcgctacggaaatgtttgagtgcgcccataagcggctccatcgcacctggtgcgtgagcacagaaagttttaccaatccacaatttacgagtaagttcttgtaagtggtcgatatcttctttcttaccttcacctgtctcaagtgctttaagcgctttaacagcccatggcaaaccatcacggcaaggtgtacaccagccacatgattcacgcgcaaagaattcttccagattacgggtcaacgacaccatacattgggtctcgtctaccaccattaataaacatgttcctaaacgagaacctgctttcataatggtttcagcatccattggtaaatcaatggtatccgccggtaaaaagtcagtagacgcaccgcctggtaaccatgctttaagcttcaagccatcacgcataccaccagcatgttcttcgattacttcacgtgcagtcgtaccaaatggtagttcccaaagaccagggaattttactttacctgaagcaccataaatctttgtgcccggatcttttgatttacctgctgataaaccgatataccattctggaccacgaagcatgattgctggcaagttgttataagtctcaacgttgttcacaatcgttggacgcccccatgcaccagcaacttgcgggaatggtggtttagtacgtgggttagcacggcgaccttcaagtgagttaatcaatgcagtttcttcaccacaaatataacgacctgcaccagtgtgcacgtgtaactcgaagttccagccagaacctaaaatattgtcacctaagtaacctttagcgcggatttgctcaagcgcttcatttaggtattgtgcagcctcaatatattcaccacgaataaagatataaccctgagttgcttctagggtataacctgcaatcaacataccttcgatcaattggtgaggaagtttttccatcaacaaacggtctttaaaggtacctggttccatctcatcggcgttacagatcaagtaacgtggaccgccatcatttggcgccataagagaccatttgatccctgcagggaagcctgcaccaccacgaccttttacagttgcagctttaatgacttcaagaacttcagcaggtttcatacctaatgcttttttaaagccggcataaccttcaagtgcttcgtaatcgtcagcactacgtactgattcttgtttgcttaaacgccaagtcagtggatgagtttccggattaccgtcgccataaattggttttggttcagtattcatacatacttctccaataactgtttgattgatgtcacttctactaaaccgtgagtatcttcatcaatcattaacgttgggcctttgtcacagttgcctagacagcaaattggaagcagcgtaaaacgaccatcttgtgtcgtttgaccaaactgaatacctaattcgcgttggaatgcttcagcaagtgtttcagcacccatcaagaagcaagcaattgaatcacaaagcaaaattacgtggcgacccacaggttggcgatagatacggttgtagaacgttgctacaccttccaaatctgcaacactaatcgttaataattgtgcgatggcgttcatttgagcatcatctacccagccattacggcgctgtacgcactttaatgcatctaaagaagctgcacgtgggtatggatagtgaccaatgtgatgttcaatttcgtggatttcttcagcagtcaaaatcccttcaacattcacacgtggttttttatcagtcagaatcatcattttgcgttacctcttagcgatccacgtcagccataaccacgtcaatggtcgccagataaatgattaagtcagatactaaactgccgttaatcactgaaggaatttgctgtaagtgagtaaacgtcggtgtacggatacgagtacgataactcatcgttgccttatccgaagtcaagtaataagtacttgcacccttcacaacttcagtcatgaatgacgcttcaccagcaggcatgacaggaccccatgacacgctcaagaagtgcgtaatcaaagtctcaatatcttgtaacgtcttatcttttggtggtggaacagccaatgggtgatccgctttatatggaccagaaggcatgttatccaaacactgtttgataattttgagtgattgttcaatttcacggaagtgaacaagtacacgagcgtacgcatcgccttcatactcaaccggaacttcgaagtcgaagttttcatagccactgtatggacgatatttacgaacgtcgaaatcaatacctgttgcacgtaaaccagtaccggttacaccccatgcaagtgcagatttggcatcgtattgagcaacattacgtgtacgaccaataaacacagagtttttaaatgcagctgtgtagtattcgttcaaacgttttggcatccaatctagcaattctttaacaagtttttgccagttgtttggaaggtcatgtgctgtaccaccaatacggaaccatgccgggtgcatacggtaacccgtaattgcttcaacgatatcgtatactttttgacggtctgcgaacatatagaatactggggtcataccaccggcatcctgaattgccgtaccacagtaaagtaagtggttattaatacggaacaattcgttcaacatgacacgaatcacttgtgcacgctcaggaactttaattccagcaagctgttcaacagccatgacatatggcatgttttgcgcacaaccacccaagtagtcaacacggtcagtataaggaatgaaagagtgccatgtttgacgctcagccatcttttccacaccgcggtggtgataaccgatatcaggaacacagtccttcacttcttcaccgtctaactgcaatacaatacggaatgcaccgtgcgcagatggatggttaggacccaagttcaagaacatgaagtcttcgtcagcgttaccacgcttaagaccccagtcttctggtacaaagcgtaagtgttcctgttcgaaatcttgcttcgctttgtcttgcatgtacggcgtatattctgtcgcacgtgctgaatattctttacgaagcgggtgaccttcccaataagttggtaacaagatacgacgaagcattggatgcccttcgaaattgataccgaacatatcgtaagcttcacgttcataccagttggcatttggccagatattcgtcgctgtcgggaggttaagatcgttttcgttcaaggcaaccttgatacgaatgtcactattacgctcaagcgataataaatgatagaacacagtgaagtcagatgctggcaaaccatcacgatgttgacgtaaacgctcatccatcgctgataagtcaaacagcattacataaggacgttccactttacgcaggaacatgaggacttcttgcacgcgtgcgcgctcaacccagactgttggaaactcttcaaaagtcgcctgcacatagaaattctcaccaaatttggttttgagctcttctacgattgcaaatgctgggcgtgaatcaactggtgttgattctggcatagcaatgtcagtttcagccattggcttggcttcctatttaatacaaattctgtcaattttctcgatgaacatatcggttagatatgtcaaaacaccgtcaaaaaattatttaatctcatccatagagcgtaagtttttaacggcaatacgctgcgcattcttacgatcacgttctggcatcatctttggcttatacactggctgaagatcatcaccaatcacggcagaaagcgggcgtcgctctaattgaatctggtcttgtaaaagcattaatgcttggattaatgcttcaggacgaggcggacaacctgggacgtacacgtcaacaggaataattttgtctacaccttgtactactgaatagatgtcgtacatacctccagagtttgcacaagcacccattgaaataacccatttaggttctaacatttgttcatacaaacgttggataaccggagccatttttacaaagcaggtacctgcaacaatcatcaagtcagcctgacgaggtgaagcacgaataacctctgcaccgaaacgggacaagtcatgcacgcctgttaaggtcgttgcatattcaacgtaacaacatgatgtaccaaagttaaatggccacaaagagtttttacgtccccagtttactgctgtatgcaagacatcctctaaacgagtcatgaatacgtttttattcacttcctcttcaagtggatctgtcacaatttgacgatcttgcaatggatattgatcagcatccggattcgcgcgggtcagagtatatttcatcccgacttactccttttcagatgacaatgcaggtgtagtttttgacttaacacgacctgatgattgggctggaatctggcctgtagggtcagttacgagctcttcaatagagttaaagcgtgtaatttcagcaatgttcattgttggtgaaccgactttaatcttctcacctgctaatttacggcgatctgccggtgcccaacttaaagcacctacagagaaggcataaacaagcgcaattaataggtcaacgacaaagattacgacagtggtataacccaaccatcctacttcacgcaccgaagtagaccatgcatagaggtaaagtgcctctaagtcgaaaacaacgaagaaaattgcaactagatagaactttgcagacaggcgaatgcgagcgccaccagcactcacgacacctgattcaaactgctcttgcttagcacgtccccacgatttccccccgaggagtaagggaactgtgagcataaagacgcaaagaaatgtaacgccgatcacgaaggcgataatcgcccagtcgtatggagtaatggcactcatgcggggataactcctggcaggcctattatttaacaaagaatgtatgtattggccttcaaatacaccaaacacaaaattaatcccgccaattgtacctgatttctaatttcccttgctagttgaagcgtcttagtcttttggatgattttccaatcaaaagtaatcatctatgtcttgtagagggggtttcaccgcttataatcggtttatttgatagttttcgcacttgtaatgatttttttcattttctgatttttaatattatttgcacaattgctcaatcggtcaaattaaacaccttacttttttataatattaatcggttttttattgtattcatcttcccctctgaattatgatgaatgtttaatcatgcattaatattttattactcttggataagagtgtttatcattaagggcagctgatgccatactcacttcgtgaattttcattttctacctccctgaaattttttctcttatttaccatcattattacgctatgttgctttattggaattgcatctcgtcctcttagttttcttgcttttttctggcctgctaactcggtatttctaggcctattgcttcgatttccacaaacacgccaaataggtagtttcgctggtgcttttaccggttacatgattgccgatttagttaatggcacacccctttttctcacccttattttaacgatatccaactacctgtatgtagtaacgactttagcactcgcaatattgtttaatcgccatataaaagcagcctatcaaggctattcttatttactcttattcgcactatgcgggattggcagcataaccggtgctttgtttgcagcaacttttgtgcctatgtttaacaccaaatttatgattggtagtttttgggccgaatttggttattgggttacatcagagcttcaaaatgctttattgttgttgcccattattttaaacatccccccttaccttaaaataaaaaaccaccttaagggtaatcgtatatatatcaaagcgattgattttttgcctttattcgctgttttaatttcgataggagtgagttattacgactcgggtccaggttccctactctaccccatcgccgcattaatctggtgcgctatccgctataaacccattattgttgctctcattacatcctttaccagtgcatatattatttatcatgtctcagggcattatttattactgtatccgcaagactatttaggcaataccatttctatacgtatagggctgatcatgatgacggttgcgccacttaccgtttccagtattagcgcactccattctgaattaattcagaagttacaacatgcaattgcccatgatgaactcacctcaagtttaactcgacgccaatttttacagtcagtccgcctactccaagaaaaagtacaaaaggaaaataagacctctgcattttttatgttggacgtcgatcattttaaaaaagtgaatgatagttatggccacttaattggggatagagccttacagacctgtgtaacgaccatacaaaatattttacatcctcatgacttactaggacgttttggtggagaagaattcgcaatttttattccggataccaccagagaggctgcctttgaactcgcggaaagaatacgcattcaaattagtcagcaaccgatttatgtatatggcaaattacccatctttgtgcaggtaagtattggtattagcttatattctccaagctatcaccgttctattgaaagtttgtttaaagaagcagacgatgcgctctatcaagcaaagcgccaagggcgtaatagagtttttatttctttgtaatatttccaagtcatcatctagtgtaatgaattttatacaatatcttctgttttgccatgtatgctaataacagataataaggagaaaaatgcatgaatctagaatatacgcataaaccagactattacttgtttgcacaattactggtgcgacatatagaaagctatattcataaacacccagatgcagataatgccatttttgacttgcgagatgtctatgaaatttttaggcaagatttcgcatcaaccacaacaaacctagaaggcattttacatattgcagactcatatagagttgagactttgaatggggatcagcctcttattcagaaatatcaaattgatgctaaaaataattcgctcttgattgactttaatacagatgcactcaatagcctgagaagcggcaaacctattttggaacctgatgcaactcagttataaatgaagcaataaaaaaagcaccttatgcaggtgcttttttattggtctttaatggcggttgtttaaagcgatgtgctggccaagtcataataaagcgtgcgcctcccaaacttggactttcatctaccttaatttccccaccaaaccagtaagcaatacgacttacgatagagagacccaaaccataaccgccagatgcacgtgtacggctatcatctaaacgggcaaaggcttcaaatacacgcttgcggtcttgctcaggaatacccggtccgtcgtcttcgacacagacaaaagccatgccatcattatgaataccgcccgtaatccgaactttgttatcacaataacgaactgcattacctactagattttgcacgacacggtgaaggtaacgacgctctgcatctactttcacatataaaggcggtggaataagttcaatttctttctgtgtttttaaagcctcagtttcaactgcaacctgatccaacacttcgaagagtacaatttctgcaaaatctagtgaaggtgtaccctgctctagttttgcataagtcatgatttcatcaattaaggtattgagcgcttcaatatctttatcaatcatgtcgacctgatgcatacgatgattgtaatcatcttcttcggctaacatttctgtaccaaagcgaatacgtgccacaggtgttctgagttcatgagatactgctctcattaactcacgttgagcctcaatcaaacgctgaatatggtcagacatattgttataacttgaagccaagtttgccatttcatcgcttccctcaataggaacacgcagtgacaaatcacccgatttcatacggtttaatgcataacgcacctgtcggattttgcgctctaacggcaaaatcaaaccgtaaacacctagacttaataagaataagctaaataaggtaatacccgccgaaagctgtaaaggcatccagttaaacattggaaccggacccagcactaacacttgcgcaggatgattcggtattggagacacaatcgaaatggttgtaccgcgcactgttgcgctatctttgtacaacatgacactttggtcttggcgcaaacgtccaatctgttcagaatccagatttacatcttgaatattttgaatattgatcggatatgagaaatgcttttgaatcttggcaagatattcttgttcctgccccggataaaacattaaatagtcgagcacaaaaataggaagagccttcatttggcgttcagtaattttgtcgacttttatagataagtaatgttgtgggtcgtcacgtaagccaataatgacatatgcaatgctattgcttgcatcgtaacgaactacagatttttgtgcttctatccgctttttctcggtccgagacagctcaaccttacttgcatcggtataataaattggaagttcgagcaaatcagatgcgtcagaaatccaatctattttttgctgcttcccaggttgtcgagcgactccttcactaatgacataagaaataccatcagttaaagattctcggtattcttgtgcgcgttggtagttgataatttgtaccagtaaatacccaaaaacagctaccaaaacaacaagaattaccagccccgcatatattcgcaggaatatactgtgtttaaacactcgaccaaccttataggaagtttaatcagattttacaatccattggtttctttaacaaacaagtaacctttactacgtacagttttaatacgttttggattttcaggatcatcgccaatttttggacgaatacgtgaaatacgtacgtcaattgaacggtcttgaccatcatattcgataccacgtaaacgttcgaagatatcttcacgcgataaaatacggccagcgtttgatgcaagcaaccataacaagtcatattcagcacttgtaaagtcaacaagctcaccgttcaacgttaccgaacggccaccattgtcgatgacgaggtcgtcaaactcaatacgttgagcaacttcatcttcaacagttttatccgtacggcgtaacaaagcacgaatacgcgctaataatacacgtggttgaactggtttcgcgacataatcgtctgcacccatttccagaccaagtacctgatccatatcttcagtacgtgcagtcaacattaagattggttgatgatagtgtgggcgaacttcacgacaaacggttaaaccatctgcacccggcaacatgacatccaagaccacaagatccggttgctcactaataatacgacgaattgcacggttaccatcggtttctacaccaacttccaaaccattacggattaaatattcttgagttaatcgcgctaaacgctcgtcgtcttcaacgatcagaatctttggtaacttttcttcttggctcatatcattgcccctataaatctcattacatgtatcttaaaaatcttgcagatacattcgtttatcatttgcaatatacacacgtttacattgtaaacaagtaggcgttcaccaaactgatacatgacaaccatgttttgttgcattttattaatctttgaattttcaggtatttttattatctgtttattgttcttaaatgtcataatctattcatatttcctatgtatgaatattaaacaaattatttcttcactaaatttaaattcactcaagtgtttgttttttgagttatccacaaagttatctataagtgttttttcacagctttggtatgctatctcccgacaaatcatacagataaaaaattactaaaaagtcaagattgatctaccgtaaaaaatcccgtatcttgtgttgaaaataaactttaactactaagtcttgtgtttatccctcaaatatcgtggcatgttttttgctcggttcaaacggtctatgaacataacaaaagtgacaatggagctatgctggcatgagcgtaattacttcgactcccggtcaaattcaggtgattaaacgcaccggagatgttgctgcatttgatgcagagaaaatttctgttgcgattggtaaagcttttcttgctgtggaaggtcaacaaagtgcggattcgagccgtattcacgaccgtattacccaactgacggaaatggtactgaacactttcactcgccgtttaccttctggcggtaccattcatattgaagagattcaagatcaagttgaacttgcactgatgcgtactggggagcacaaagtcgctcgtgcttacgttatctatcgcgatcaacgcgcaagtgcccgtaaagacacaaattctaatcatcaccctaccttgcaagttaccgatgcaaacggtcaacttcaaccacttgatttaagtgcactgcaagcaactgtaaatcgagctgctgaaggcttagaaggtattgatgttcaagcaattatcgatgaaaccgttaaaaacttatataacggcgtaaaagaaagcgatattgctaccaccatgatgatggcaacacgtacacgtattgaacaagaacctaactatacatacgtaactgcacgtttgcttcgtgatgagttggtcagcactggcttagcattcttaggtttaccggccgatacagctgaaaacaatgcacttgaagcattcttgaaaaaaggtgtagagcttgatttgctttcaccggacttgcttaagttcgatctagaaaaactagcagcggcaattcaaccggaacgttctaaccagtttacctacttaggtttacagactctatttgaccgttacttcatccattcaaatggcgttcgcttcgaattaccacaattattcttcatgcgtgtgtcaatgggtcttgcacttaatgagcaagacaaagaagagcgtgcaatcgagttctataacttgttgtctagctttgactacatggcatctacgcctaccctgtttaactcaggtacattacgtccacagctttcaagctgttacttaacaacgattggcgatgacctttatgacatttatggtgcaatgcgtgacaacgcgatgctctctaaatgggcaggtggtttaggtaatgactggacacctgtacgtgccttgaactcttatattaaaggtacaaacggtaaatctcagggtgttgttccgttccttaaagttgcgaacgatacagccgttgcggtaaaccaaggtggtaagcgtaaaggtgcggtatgtgcgtacttagaaacttggcacttagacatcgaagaattcttagaacttcgtaaaaacacaggtgatgaccgtcgtcgtactcacgacatgaacactgcaaactgggttcctgacctatttatgcaacgtgtgtttgaagatggcgaatggacactattcactccgtctgaaactccagacctacacgatttaactggtgctgagtttgctgaacgctatgcatactatgagtctgttgcgaaagaacagaacatgttgcacaagaaagtacgtgcgaaagacttatggcgcaaaatgctttctatgttgttcgaaactggtcacccttggatcacgtttaaagatgtttgtaacttacgttcaccacaacaacacgttggcgtagttcactcatctaacctatgtactgaaattacgttaaacaccaaccaagacgaaattgcagtatgtaacttaggttcgatcaaccttgttcaacacgttaaaggcggcgtattagaccgtgagaagttagcgcgcactgttaaaacagcagttcgtatgctcgataacgttatcgacattaactactacgctgtaccacaagcgaagaactctaacttgaaacaccgccctgttggtatgggtatcatgggcttccaagatgcgctttacgaaatgggtatggcttacggttctgatgaagctgtgaactttgctgatgagtcaatggaagtgattagctactatgcaatccaaacttcaagtgacttggctgttgaacgtggtgcttactcaacatttaaaggttcattgtgggatcaaggcatccttccaatcgactctttagaaattgttgcgaaatctcgtccagaacgtatgtttgaagttgaccgtactcaacgtttagattgggacagtttacgtgccaaagttcaaaaagacggtatgcgtaactcaaacgtaatggcgattgctccaactgcaaccatttcgaacatttgtggtgtttctcagtctattgagccaacattccaaaacttatatgtgaaatctaacttgtctggtgagttcactgtaattaacccttaccttgttcgcgcattaaaagaacgtggtctttgggacacagtgatggttaatgacctcaaacactttgaaggttcagtacaaaaaattgctcgtattcctgaagaattaaaagcaatctttgcaactgcgtttgaagttgaaccacgctggattgttgatgctgcatcacgccgccaaaaatggattgatcaagcacaatctcttaacctttacatctctggtgcaaacggtaagaaacttgacatcacttataagatggcatggttacgtggtcttaagacgacttattacctccgtgcgttaggcgcaacatctgctgaaaaatctacaattaacacaggtgcgttaaacgcggttaaacctgcaactgtagaagcagcagcacctgcggcagctccagtcgtagaagcgaagaagcctgaagctgttgaagaagacggcttcactcaagcagctccggttcctatggcttgttcaatcgacaacccagattgcgaagcttgccaataacattcaataaagttgctctttaacaaaaagagcaactttaaacgaggtaaagattatgttttttcatctcagccataactatatgcttggtgttggaatcttaatctttgcctttattttcttttatacgcctatggtttacgccttttttaaaatccgtaaacaacagcgtaagcaaaataagttgtagggataatggaccaaaggcccaaaatttggtcatacatcaataaaacttaattttgtttacacattatgagcgtatagtagtgacatcttcgtttagagatgtcgaacatagatatatacaacgaagagagaacaacaatgtctatccttagttgggacgattttgaagatgattcgcaaaaaccggctgcacctgaacacaagtctgcgcccgtcaacccggaaaaaacgcctgattcgcagaatgtatctgctacgcagccatcatcgcagagcgtggcagctccacaatccactggaacccattccgtgcgatcaacaaatccaaccgattcaatggctcgagcatctgaagccttagaacatttggatgttgctcctggccttgaagagttagaaatgggcgcgcaacgcgttcaggttgacgacaaagccatgattaactgtcgcgccgacttgaaccagcttgttccatttaaatatgagtgggcttggcaaaaatatctagatggttgtgcaaaccactggatgcctcaagaagtgaacatgaaccacgatatcgcactttggaagtctgaaaatggcttaactgaagatgagcgtacgatcgttatgcgttctttaggtttcttctcgactgcggactctttggttgcgaacaacctcgtattggcaatttaccgtcacatcacgaaccctgaatgccgtcagtacattttgcgtcaagcgtttgaagaagcaattcacactcacgcttaccaatactgtatcgaatctttaggtatggacgaaggcgaagtcttcaacatgtaccgcgagattccatcggttgcgcgtaaagcagcttggggcttgaaatacactcaatcattaagtgaccctactttccacacaggtacgcctgaaaacgaccaacgtttacttcgtaacttgatcgcgttctactgtgttcttgaagggattttcttctactgtggctttactcaaattttgagtatgggtcgccgtaacaagatgaatggtgttgctgagcagttccaatacattttgcgtgatgagtctatgcacttgaactttggtatcgacatgattaaccaaatcaagattgagaatcctcacctttggactgccgagttccaacaagaagtgattcaaatgattcttgaaggtacgatgcttgaaatcgaatatgcacgtgacacaatgccacgtggtgtattgggtatgaacgcaagcatgatggaagaatatttgaaattcatctgtaaccgtcgtttatctcagttaggtttaccagagcaatttgctggtgtaactaacccatttgcgtggatgtcggagatgatggacttacgtaaagagaagaacttctttgaaactcgcgtaactgactaccaaactggtggtgcgttaagctggtaagttttactgctttcgtcacgcgacacatgagttgacatttacgacacatgtaacaacattatgcgacacatgtaatgccactgatataaaaaatctgacttaaggtcggattttttattgctcacaatatcgtaaggcgacatataagttttccttaacgacaaataaaatttccttgaaataaaaaatagagcctaatagctctatttttttattgaaaattaagcttgcaatataattacaaatccttatggttaattgctgccatcgctttctttgcaatctttgttttaaatctaccatttccactgatcgttcttacggcaggactgacgggttattttacaagtaagaagtatcctgaactcttttctagcaatgcgggacacaagaaaagccaaaaagattatggtattgctttaatcgatgacgacacactaacaccagatcatgcaaaatttagagggttacatctagttaaaattctgattattgcggcccttctctggtttattcccgtgcttgggcttgaccgctaattgacagttgatgtgagatttttgacgcatatttcgagatagttataattcctctatcatgggatacataggttgaaacttaccattacgcaacatatgtaatgacattagaataaaaaaatccgactgacgtcggattttttagatatatttaagcttatcctatacttgtaaagctaaaaccaaaaaaacagaatataatcttgttaaaaatttatagttgggcttcaaatacccctaaatcaatattagagattaatcatttatgagtcattcatttaaagttgcagctagaaccttacgccatttaggaggagaattaataacttctgatgaaatggctcttaatgaattaattaaaaatgcttttgatgcgggatcaaagagagtaaaagtatttattaactaccctatgaatttagcagtactctcaaaaacgctagaagatttcacatctctgaaaataaataaaaacaaagccttagagctaatagagatcaataccaagctctatatcaacccactcaacacggcccccctctctacttttctaacttatattgaccaagtattaaataccattaatgagcaaaataaacctaatatactctctgaaattaaagataatttttacaatataaagatatgtgatactggtcatggaatgaccgaatcagaactcgaatcagtttttttaacaattggtaccccttctaagttatcacagaaatcaaatggagatcgtattcttttaggagaaaaaggaataggccgattatctatgatgaagctaggaaataaggcaactgtaataactaaaacaattgatgatcaaatatgtaattcaatatcttttaattggcaagattttgacaaccctgatttgtatcttgatgaaatcaccattgaaactcaaaaaattaattatccagaaacatttataactggcacacaaattcatatcaccgaactattatctgattggagcttaaaaaaaacagaaatatttgtaaaagaatatattcaaagactaagaagcccttttagagaagggaagtctgattttccaatagatattttattaaatgataccagattaaatataacccctatcccaagctggttaaaagaacaatcaagcctacaggcagaatatatatttgagccttctcagatcaattcagctcttcatggaagtttgatatggaaagattcatcagcaccagatattagaagttggtctattgatgatctatctagaatactaaacacttcaagttcacaattaaatcttttaggaccgcttaaaataaagtttctctggtttaatcgtaaagatctaattggcaccatagaaagaagtctcaaaaatattaaagaagagttaaatttatgggtaggcggatttagtatttatagagatggttttagaataggatttacgggtggattaaatgatgattggctaaaaatggatagcaaggcacttaaaagtcaaggttatactttcaatcgctatcaaactgttggtgaaatatctattagtaaaataaaaaatccaaatttaaaagatacagcaagtagacagtcattagttaataataatgaatttgaactactacaagacctcatatcagaaataattattaaagatacaaaaagtcgaatcgaagatagaaaaaaaatattagaaattgttgcaactgatgcattcataaaatctttagataaatctgatgaatcatataaaaaggctagtgaagccttaaatacattatcaaaaaatggaagccaggaggataaagatattattgacatggcccaaaatgttatgaaaaatcaaaatgagcttattaatcaattgaatgcaaaaatggaaaaggctttcgaaaccaatacggacatattggaattagcaaatttgggacaaatggtagatattattgctcatgaattggctcgtataacagagaatacatcaaatcttttaattcgattaaaaaatagcgaagacaataaagaagaaacatcaaatataatgaatgaattgcgtaaacaaataattgcaactgagaaaagaattagaagtattgatgtattaagcccagcagtaagacaaagaaaagaaagttatgatattacagcgcagtttaaaacaatacttgaaggatacgcacctaaacttcaaagacataatattaattataaaataactgttgatgactcctctgaactaaaaccagtacaggttacgatggttagaggattagtagcacaaattatggaaaacttactgaccaattcagtatattggcttgaccaagggttaaaaattggcgaaaaagaaaaattaattgaactcaatattgagagcgatactaaaattatatatatccgagataatggcccaggggttgacccagcttatcatctagatattttcaagccctattttacaaatagaagagggggtaaaggccttggattatatatagccgcagaaattgcaaaatatcacgaatcaaaattatatttgtctaatgaaattgaacaagatggaaagttaagaactttcatcattgaattaccgaagagttctatttgatatgaaaccaacctcacaaccaagcaaaaagaaaatccttatcattgatgatgaaattgagggtatttctctcaaaaaagctcttacaactgctaaaacattctttgaagctttaagagatcctgatagtgaaattcgggaggaaatggataactttctgaataagcatcaaaaccaatttcaaaataaattggaaactgatggtactgttcatgaggctttttttaaagaagtaattctttctgatagctttaaaaatagcctatccacagtttcattaacttataaatctctttcaagcttatatcaggaaaatgaatggcttcttcgtatcaaagggctaattacaaaagcatttcctactgacgtctatgacgttaaatatttagaaaatgtggacaatattaatattgatgaattagatcagtttgatttattaatagttgattggtttcttgaaaatggttacagccaatctagtgatctacttcttaagctttcagaaaaagataaccttcccgcaattattttattaactagtcatgaaaatatattagagtcaaataccaaatctgacttttatataaaaaccagaattagtggtgctggtttaacgatattaattaaaaaagaaattagggcagaaagttttggctatattggattaagaatgctggctgagaaagccattaaacaaagaccaatagcaaatgcaagtaggcattatattaaacaatgggaaaacgttttagagtcagccaaacagaatactattaagtctttatggcagttagatacatttattatgaaaagtattcatacagatgctatttcagactcccaaccatatagcaatcattttcatgatttcatttcacgtgaacattcatggcatatggaaactaataccacactaaatacatatgcagaaaatttaggaaccgcacttaatgagcacaattacaatgatttattaacacatcattcaaatgaagactccataacactacatagagagttattacaacattattctttccaaggtggtgttaatacattcaaaatccatgacatcactaaagatgaacttcaacagaagattttagaaaaattaccatttggagctgtactagtacatggagacaattcaacctcagattcatacgaagctttcgtcaacatcactcaaccttgtgatctaagtggccttattcgtaaccaaccaaataattcattaatattcatgacattatcattaaaaaagagattagtaaaaaactctatgttttttgatacatcaacctatcatatttatggacttactttaaatgatactctctatgacatgattcctaaaaataaacaactagtaggtataaattttaatgaattttatcaaaaatttaataactataaattagttggagtcttacgtaatgacataactatgagtttacagcaaagtactgcagcctccattattagaccaagccaacctaggacaaacagaccatgttttggtttagccaaactatttcttatttcatgttcatcaacaggagaaaaaaagtgtattagtttccctaatgaaattgaattcttaggttcaacatataaattagataaaactaaaaatctaatacaaattataggaaataatttagcttcagctgctttttgggtatgccaagaactagaatttcaagacaattcagatgagtttaataacacttataggctctttcatgaaagtattgatatctcaaaaccatcaaacatttctcatcagactacagtaagaatgctaccagtggactcttttgatgatcattcacaagcaatacaaggtatccaagataaaatccataggaataagaatacaatttgcttaacttatgaaaaattccacgattaaacttatttatggcaaaccaaacaagcccctgccccctcgtcttccaagtatagatcatcaatatcaatagtatctattctttgggggcgcagtggattaacaggttttcgatgcatagccctttgttttcttagctcataatctttataaatttgcgccaaccgttcaggtttttcaagatcacttagagattctcctcgcgtccaagtaaatggagagcctgaatctattgctgttttctcatatgcctttgcgtcttcaaatgccttaggatggcgttcttttaatcttgcccattcaattttttgttgaaagaaacaaaacgtacaaccacttctagaacgccactcataataagctggcagtccaataccagaggactctagcaaatcataaacgcctggcttatcaatcccatgttcacgaaaaggtaatttaacttctaggtttttatgttgagacactaaaccttgacgatgatcttcatctgcacgaattgcaacatagctatatactttatctccctgatctagccatggcttaatccactttttaaaaggtgtgagctttaattgtctggtacaccaccgggtctgtgcactaggcaaaaaattattatactgacgaagccaaaaatcaaaatcacgatcgccattaatatattcgattttctgacctaaaaaaccttcaagttttgctagaaactcataaacttcaggaagttctttacctgtatcagtaaaaaaatagcgtatttttagttcgggaaaattttgacgcatatagattgcaagagctgcactatccttccctcctgataatcctagaacatgatgttcagtcaagcctcacctccatttatatgctgtagctcttgtatgactttagaacctgcatcaactaaagcagctaggaacacttcttttttatattgtccgttttctaatgccttaattaactgcttagatagaccttcaatatcattagcatcatgttcagaaacatcaaaagagcctgttatagtttgcttaccacccaaaacaatccctatagcctgtctagttggttctctctcacggatactagcaaaaacctcaagacgtctaaattcagttgcccatgcaataagttgaagctcgcccgcatctatatcatggtctgtccatgtatcacttggcttaccaagtgccaacattaataagccttctaactcatgagtatatccactataagatgccatacgagtaataaaagcctctaatctaaactcagcaccaatcccagatatattttttgctcgcagatgcagtaaatctaaattaatattttgttgatctaaagcagtgagtaaatttttctctattttacgtaatctaatttcaaagatagaaataagttcattgatgacttctgaggtacgttcaactattaactctgcattagtagactcaaatacagcaggtaaatcagtaaatagtaccttatggggatctgaagcatgtaaaagcatatctcgaataactttcgcttctttagatagtgaattagttttacgagtccaagctgggagcccaaaaactattgatactaaggctctagctgagtctaatggttcaaccttaactggatagcttaactgtgatgataaagaattagctaagagcttcaacatctttttctcactagttttaagctctacaaacctccaactgattcttttaggtgactgtaaccattcatcaattgatgtttcatttaaatctggggtaaacatcccatctgtataaacggcaatatactgtttatatgagataaaaaaagcccaaactaaaattggctgtaaacctttctttacaccaaaaggagctttagataataaatcaaaaatttcagagagattgactacaccctttgcttttcttatgaaatcttttattccattccataccccaacaatattacatggatcaaattctgcttcaggtgcacatatctgccaagtatcattttgataacgatgaatattgaaggccttaatagttgttctataaaggctggcagctgcagacatattctcaaaacctaagttttcaatattgtcattcgcaagtagtgctcttaaaagatctttctgggctttaactgcactagctgaaagagtatttctattgacaagttcactactaactttaggtgataaattaaaaatttgatcagccaagtctgatgctattttggacagactgccagtaaacgtctgcttaccccactgccataaacaattattaaaagcatattttaactcatcattcaaagtttgcttgacgagttgaattcttgctaacacttctctcatagcaatactatcagaatgcaatttgaggctattatttctaataaactctaagcttgcgagttccttcgctaacccttggatattatctccatttttagggaaaccaattaagactcctttagcaaaagcttttgaaactaattgctcattcttgcctatttcatctttatctttaacaataatatcaggaattacaagtaggaactcaccaaaagcacttccttgagtctggaaagagtcaatatgctttttcacttctctttcagaaataatagaacagtttaaccacctcatagcccctgtattccaataatgtctacgagccgttataggggtaaatgcaagggtattttttaattctttataatcaacatccaacacatttgaagtagcagtatttagtgcagcttcaatatcaaaatcacttcctgcataaacaccccaagcacctatatgttttctaaaaattaaaattgatgctcttgctaaatcatttaaggcatcatgaatttcagtaatagatgcgttaggcactgagcaattcaataactgatcctcagcaacgagtcctgatccatttctaaatatttcgataagagcaattgttttaactaagtttacatgaacatttgaaaagatcgcctcagctctttcaatagcatccacactgattgaccatctatgtccatctacagaagctagtattgcttgttcgaaattaccccgtagatagtcccaaaattgatgaggccaataatagtcaaatatctcgccatccattccttgtaatacttcagaaaatcctagcggctctaccgaagttaaaaagctaaagatactgcgttcattctgaccaaattttttccttgatgcaggtcctaacataacagccattacagggtgaagtggccaacatgcttctaataaaactgaaagattcgatacagcgcttggtcttcttttgtgaataaccttggagacattttcagcaacttttcgtgcttcttcatattgagtctcaacatgaatcgccttgcctattaactccagagtttcatccgtatttgtaactaaaggaatatcaatataacggccttgtactttcgcccactcttgttgaacgttacttcctaacttagctgcatattgctcaaaagattgatgcaaaatcccgataataacaagatttcctttacatcttgccgctgcttcagcaaggtcctgatagaatcctatatcttctccagaatatgctgcatattctagaaattttccaagttcatcaattaataataaaaccccagatttttttggcaaaacctctgccaacttaaccaattgatttatgacagaatcttcttgattaattagtgatttatattgttcatctatggagtttaacgtcgcctgaatttgcgattcaatcgaagtctttttccctactatcggcaatacaatccaaggttcatctgtgtagaaatattgcttaataccaacatttatttcatcacccaatatagagcgtgacaaatctctaatatctttcttttcattaacacaagaagctaaagttaaagcaagagatgactttccaccaccatatggtcctgtccaagtaaatgctttctgttgtgactccagtaaataactacctgtaatatcaagtaactgttttgcaggagactgtaaaatgtaaccacttattgcatctgctcgacctagatcagtatctaaacgaattgagcgtaagaaattacggtgtactgatactaattctgataatttcttactcatacgcacctcttaaaattcgcatttttacagatccccaagtttctgtaccaattctactcacctgacgaattccagaactatcagtccactgcaaataattattagtaatctctgaaattcttgaaagacgatcgccaacggcactttcatctaacttgaatactcgtccaggagatccgtagtcatgagcaattaaattaaatgacaaagttttttgagaagtattagtaatcaattcccattgttcccaaaaatctagtaatgcaaatgcaaaaacctgatcaggcaatgaatattgatttcccctattaaaacggtattgccctttactaatttctgatagtaaaccgattcctgcaagtaaaggttcaatattgtcctctgtgtcatgcgatgaaaaataacacttcatacttgtcgttatatcagttgataacgtgacatcagacctgcctttctgattagatagagctagatcggaaatgagcttcttcacctccaactcagtaaaggtctgattttgaataaaattataaatagaataaatagttgctgtacgtcttgcccttccggctagtaaccaatgtaataaccaaagagtagcttcactttctaaatattgatcgacgccacttttctcatcaaagagtaaatatccaatttctccaatttcgaatccattcttatccgtatgttctctaataacatcacaagctaatgcccaatgtttaatagccgcaaccatattcttaccaacaccaaatcgctcaatagcgtcaggagctgaaaaaacggttttaggagcataatcactatcagcttcataaaacttaaaaacttggtgatatgccttttttaaccacaattgacgtaaaggaaaagtttcatgccctgaaaacataggcttcatggtcgaaggaaaatttattttattcattggctggtgattctatccagtaactattgtacttactgggacattctaccagtagaaacaataaaactaaattgaatctctaagaatagttacgaagactcagcataatgattaagaagtgacctctattaaaaactgataagatgctacttaataatttatataataattcactacttacatcatcctagaatcaaaactctaagtttaatttttcagaattatacataatatattgaaaaataataattttctataaattaatacttgagttttatcttttctccttatatttttaaattattaatggttattaagtaatctttccatgatgagaacatctcaagaagtaagaagtgaacttcagaaacgaggtctatctattgcggactgggctcgtcagaatggattcactccagaattagtccatcaagttttaaattcaaacaaaatccctgtccgtggtaaaagccaccagattgcagtcaaacttggtttaaaagatggaattatagaacctgattttactttcgaaaaaatgaaggagacgcagtgaccagaatttaataaagcacaaataaaaacggaccccgtagggtccttggctctacacctagatatagagacctagcaatccaagtatcttccgtgtagagccattcgtcaagagttgcactggcattttgtttttacagaacgaattttatcgtccttaaaaaacaaaaaagtgcacatcgaatgaagcatatatggaagatatatcatgaatatttttacaactgatgcatgggacaatttcccagactcattacatccgcagattgttgatgcattcaataaaaaacctgatcttgatggcgtcctgcatggtcaacgacatattagtcaaggcagtgtaggaaaaagaacaggactattttctagttataagaataacggaatgattccttatgaaagccaactagaattagcccatgcaatacaacttgagcgaaatccgtctgttaaatactatcgcacccaagccttaaaaattccaataagccacaatcagtttctttatccagactttctcatcaaatatacaaatgaagaaattgctttccatgaagttaaacattcaaaaagatttctagatcagaaagatatcgaacgttatcaacgtttgaaaattctcttagctccaagcggtattacttttgacattgtcgatcgtcatgatttgtattctgacgcggaagcaaaagtattgctgcattacaatcggcgaagtcatgcaagaaactggtctagttttgaaattcaatttgctctatctctgctgacacgtagtacatcactagttaaaaaccaattaatgagtatattaaaaaacaatggtttgcccttggagttgggggaatttctcatctttcataaatatataaagcttaatacgccaaataataaacaaggaggaatctaagatgactattcctgattttattcctcaagtgggtctacgtttttcttttaaagatacaaattttgaagtgacctatgtacacaacaatgtagttcgtttttccgcagtggatggtggaaaaacaagcaacatcccgattaatagcttctctgaaagatataaaactggagagattcaatgtacctcttccccccataagctattactcaatggtcaattacttgataaaactagacgagctgaaaattatataaaagttattattaccacgttagatgactacttttctcataaaaaaattggagctgtaattcctgaaattgctaaaaagatagatgatccgttccctcctagcacctcaacagtgatccgttggattcgtagatatatagaaaatgactataatttgctaaatatttataaggtaaaaatcggcaatagattcttcagattttcaccagagatggaacaaattatatccaacacaatagagcaaattattaaagataaaaacatagctctgacccataaaaatattcagatatatatctatcagaaaatgttggaacacgatattcaagaaaacccaccatcaagacgaactattcaacgtaggcttaaacaatatgatccgtataaacttattaaagcaactgaaggaacaagaatagcaaatcaaacacttaaagcagcaggacgaaagatgaaaagtccattcattttagcaattgtagaaatagatacccatattctagacattatcattattgattcaacaaccaatctcccccttggccgtccttacctaagctgtgcgattgatgtacacacccgagctattgttggttattacatcagtatgcttcctcctagcgcaacaaccaccttagctttattaaagaatatgcttctacgaccatctcagaatttacctggaggtattccctccttaattgttccagataatggagtcgagtttaaaaatacggcactaagccatatctgcaatcatttgaaaatcacaatacagcctgcacaaaataggaacccagataataaaccacatattgaacgttttttcggtacgcttacatttggactaattcaacaattacaaggtacaacattttctaatcccgaagctcgcggcgactatgactcaagaaaacatgcaagtgttaccctagaaaatttgaaatcatatgttgatgaatggattcataatatatatcactgctcaatccactcaatgacgggacgagcaccaatgctattttgggaagatgcttctcaaagttgtccaccattaaccatatcaactgatgaagtagatattattgcccgtcgcccaatcagtagaaaaattcataaaggacaagtcaaatttgaatatttgacctacttttcgcatgcgttagcaacccttgaagcaaatggcttaactgacgttattgttatgattgatgagctcaatttagagcacgtatatatcaaacactcatcaattgatgaagtaatacgagcggactcaacagagcctgattacaccaagaatctctctctgcaagaacatcttgaaattcgcaaggaacttaaactggtatctcaagcagataagcaaagattaggaaaacatcgcgtatggtacgctcgatggaagttatacgaacgcattcaaaaagatgcttgttctaaaaacaagaagttaaagcagttaaaactagagcttcctcaaacacttaagaacctcttagaccaagatatccatacagtgtcccaaccaatagacccgtcagcttcaacatttatctcctcttctgaaatggatcttctaaatcaatcaaaccttgatgatgattttggaacattggagtttgatgatgaataagttagatgcacttgagttgagtaagaagcttaacaacatggttattacttcctcagagtttaccaaagcttatgacggcattacatcttgttcagcacagacgaaagcttatcagaaacctattggcagcttacttattgcagagggtggtcttggcaaaatgacactttcacaatcaatcctgaaaaagaatccttgttatgaaaaacaagaagatggctacacaaaaagagtagtccctgtgttctatatacaaatcccatcgccagcaacagttaaatctgttgctggcatgatgctaaaagccttgaatgatccagcacctctttctggaacaacagcacagatgacagaacgtttgtgctatctcttaaagctctgtgaaacggaactgatcctgatggatgaattccatcatttatttgatatgcaaaaggtatcaaggaagatgaatattgatgtctgtaattggatcaaaacagtgacagactcaaccaatataagttcctgcttaattggattgcctgaatttgcacctttattgcaaatagatagccagcttgcgcgacgctttccactgacatttaagttatctcggttaaatatcggttcaactcaatcaccaggaaccctttacgggttcctatcacaagtagaacaaaatattgaaaaaagactcacattaaaatttttaccgcgattaattgatccattattcgttctacagatttacgcttcaaccaaaggataccatcactacattatttcactgatcagagaagcaatgttattcgcccttcttgcagacagtgacgttattactcaacagcatttttctttggcgtgggataaaggcattacctcatataccaatatgaccacacagaatccttttcatatggacacgtcaaaactagtacaacgaatgaagggtgatcactgatgcaagagaagcctttaataccagcaatcccaacaccatttcctgatgaaaccgctggaagttttctcatccgtctcatcaagctgaatgggcatatccatagctcaactttttatcgatctagaatagatctcaaatacaaagagacactgagctcaataaccacacatgattatctcttccttaacatactcaagaaatttcagcttcctgattatttaaaagagttatcgctcaaaaggcattgttctaccttacgtgggaatgtaatctggaaaaataaactagtaatatcaaattattttttttcaaacgatgtcgaacgattttgtccactttgcttaaaagaaataccctattggagaaaagtttggctagttaaaccatactatgcatgtttgaagcaccaaattcgcttacacacgacttgccctagatgccaatcaacgctcagtagtttgcgttccgaaatctatatttgctcaaagtgcctaggtgatataaggaattgcgaaattgaggcagtatcagatgaacaaattaaacatatccgatggtttttagaatttatagaaactgaagaacaagaaaaattcaatttattaaaaatcttctggtccacacttaaaaaattttcagcacatgatccagtcccaccttcaatagaactattgcttgaaataacctatttattctttatggattgtgattcctctatagaaaggatggttgactggatatctcaaaggtctcatcaagtccatccaagaattcagctagttccattccttattgtagataccaggtattttggacaatatactaaaaagattcttgagcaattgcctgtatccactgaattggccccagaacatttattccatttattaactattaaggaaagctgccaaatcttagatatatgctactcaacgattcaaaggtggatagaaaacaataagttacagtatgtagtctcaaaggatattcctaaaaaccgtaaattcctttcgagccgcgatatagagtatttccttgttcagaaggcacttcacccttctcccaaaaaactgaaacatccaccaagaaaagatgggcaaaggctcactattactaatgtggctgctaaactgaatgttcattatgaaaacattcgttacttgattaggactcgctatttaaaagcagaaaaactgttggtcaggtttagatgtgcttattttattaattctaaagacttagaggaattcaatgaaaaatacatcttggttggcagcttagcaaaaaagctaaaagttatccctcaaaatcttactgaaaagctcgccagtattgatattcatccaattagtggaccacatatcgatggagaatttaacaacatatttttgcaagaatccgtaagacatttaactaaaaaagatattgaaaaaataattaactatccaactcttacaggtcgttatcctagctttgaggagcaacttcctaaaccgccaccaacttacctttctttaaatgaagcagcaaagaaactccatatcagtccaaataaaactgccagattagtcgaaaaaggcgtccttgaaaaagatacatcacataatttaagtatttcaatcagtattcaatctttaaacatgctaatcgcaaacctgcataatcctaaattcatatctgtaaaacaggcacttatacaactaaattgttctgcaaactggtttcatgagtattgggttgaaacaggttttattcatattcatgattttctatactggcattttgttgaaagaaatgagcttaataaagtactaaggttaaagaaaagttatcttacgggcaccgaagcaagcactcttcttggcatgcacaaatctcatgtgacaaacttagagtcccaaggtttaattgaacctgtttatttcggaacaccaaaaataattaagttatttaaacgagaagatgtcataaaattaaaggagttaggatatggggcaatcaaataaattctaaatagttcgctttatatctttgatatcattactcatttagattattaaaattgctctcatcgcaataattagagctgattacgttcctcacgacgttttttgagacgtgcaaccacttgatcttgtggaattccaagtcgttgatctgcttgtgatgcctcaactttgtctttaaaccatgcattgtattgggcttcatggtcggagctatcaaactcaaactctataggatcaaattcagtgttcatgtgcgtcccaatcaatatatgatccaaattttaacagggtttatcctttttaataagagagtacattatttatctaaatataaaaaaccttaggcacttgaataatctaaagaattaaatcaaccccatgccaacatagtgaaaaataaagaaataattatagaagataaatattcaaaattcattttgataaaaatcatcactaaaattagtacatcattaaagaataagaattagcttacaattagaatcacaaaataaacctttataagataaagaaatacaatcaccataatactaatcacaaacaaaggaaataaaaaatgcaaattgaaatattaaaaaatctaccaaatattctatttacaacttactcacctatatggcttgtagtttggttcacaagcatttatcagattataaatatcacaataaaaattgatgatttaatatcaaaaaaattaaataatcgccaatatataaaaacctccttaaattcaatcctaattttttttaaaaaattatcttctgctctacaaaaatctcttcaactaccagatgatattgagccttggtcaaaaaagatacctactccagtaaagaaatttggaatttacattgaaagttccatatggtttattgcatcattaaccacaacaacatactttattctaattgctttattaactattttaactaaaaaattgctaactattcctgattttcttacaatttttggtatttcagccatacttgtcgtatgttcaagattcttatatgtggaaggtcgaagatgtttattaaaagcaaaaaattataataaaattaatatctaaacaaagaaatccttaaaaacctcttcatctaaatctttactttcataaaatctttccatctgaagtccattttcatttaattgccaagaaaagtaatggcttttcttggcagctaaattaggtgtacccaaattattatattctgtactttctttcatttccaacttaaaatacaacgcgtttattccttctttctggaaatccctaaagtaattaacaaacttactccaagaagtatccatatcacctttttgaattgaagatttaaaataataaattaggcaatattcaataacaaatatttccaattcctttggaatatgatcaagtacggagtttgttgaaaatattccaatactattatgtggaggagaaataactgatactttaaaaattaaaacgttcagaaaaatatctctcttttcttttaaatgcaacaagtagtaaagcatatcggaataaccacgatgctctctagtcattgtacgacttacggggtcttttgtttttcctatataatgcacttcactttcaagacctaattcaacattatattcatataaaaaaacatgaattggccatgttattttaacatcttcatcgaacttaaaagttataaatttttcgttaataattattttcttgaaatctcgccaataatcatgatcaatattaacttttcttttttctgaacaattgataattaaatttaagaatatttcaccaatattcttgccaattttaattttccgtgagagatcaaacctaactttaggtctagatgtgaaaaagtaaataaactctttttcattacaatcttttgaggcttcaacttggtcatttaatatttccttataaaactctttatactcttcacactcatccattatcaagtcataccaaataggtgtcgaatactctattgataaaacccacttctttgaattctctttaaaaaaaatgctgtccttaatcttattattaaaataacctcttttcatcttctctctttactatccttgttatgcaatttaaaaaatcatttaaaagcatcctatccaatttatcataagaatcaatacctaatactatattaagcgtcaaaatatgtcgcttatcaaaatgtcatcttatgtgtcgttttactcgtaaaatgttagcttatttgtcttattttcatgaaactatttgtcggttaactatctaactttttgttttataaaaatactaatgtcaacatatgtgtcgcgtgacgacgacatatctaacaacattacgcgacacatgtaatgccactgaaataaaaaatccgagctaaggttggatttttattgctcagaacatcgtctttattagtcaaagaggctcccactcaaattgacccatgagctttaatttattatagtagcctccaataggtgttcctctacctttaaatgtggatggaaaaatgggtgtcccactacccttaaatgcggattgaaaataggcacaacaaaacacatctgatgccgctaaaataagaaatccgacattaagtcggattttttatttcattactattcaaacaattactaatagtattttaatagtctgaaatataacttagttaaatcaataatcctcaactttagtacctttcagtatttttattaattaataaaaatgcgagtttaactcatgacaaaaaatgaattctacatattggtcgatattgagaatatcgggacctataccaggtgaatttagcttattatccattggagcatgtatcgtatctaatccggcaatatcaatatatcgtgagttaaaacctattagctcaaaacatgacttagaggcaattgctgtaacaggtctcaacttagaaaaacttgaagtagatgatttagatctcctaatggctatagtaaatttaaaaaaatggataaaatcatcatgccctccaggccaagaaccaatttttataagacttaattccctatttaattggtcattcatcaattactgttttcataaatctttaatgcaattaaattataaaaccagttaaattcttaaaataataaaagtaaatcaataatatattagctatattatattaatatttctcatatttatttcctctcatttggctaaaatgttagcatttaatatacatactaacttcctctgtaaatgaaaatctcatctaaattttcatttcatcaaatgtccgagttacatccatatgaaatattcatctgaagcttaattatattcattatcaatataattaagcagtgatgatattaagagacaatatatgagtaccgaatacactgcaccttctgaaagggcaggatcaaaagtttatcgctttttcgtaatacttctacatgtgttaatcgcattattcttaattatccaaggtggaaaacttgttagcttaggtggctcaagttattaccttatcgctggtattgcctatctactgattgctattttatatacattcagaaaagtagccagcttatggttatccattttaactttcatcgcaacagttatatgggctgtttccgaagttcaagtctttgacttctggcaatatattccccgtctagttgttccaacggttttatttgtactaagcttatgggcaagccgtagtttaataacgctttcaacagaaaaagtgacttttgctaatcgtgttggtttagttggctttattgcttgtgttatagctttaatctcagctttttttccccatggaaaaactctaaatcaagttaatattgctcaagatcgtaatttaactaaacctacagcagaaaatcctgataattgggaatattttggtcgtagtggtagtggtacccgctttgccccttatactgacattactcctgataacgttaaaaacttacagattgcatggacttaccatactggccgaccaaaaaatattggagtcgatgaaaatactccaattcaaattggtagcacactgtactcatgtactccaactaatattattactgcgcttgatggtgatagcggtaaagcactttggaaatatgatccaaaagcaaaaacagctgaacacattacctgtcgtggtgttggttactatgatgcgactcaggataaaacgctttcaaaagcagatttacaaactcctagtattcaagcctgcccacaacgaattttaacatctactgttgacggtcgtttaattgcattgaatgcaaaaactggtgctttatgtcctcaattcggggtaaatggccaagttgacctgttaaatgacatgggtcctactgaaaaaagtaaacgttaccatccaacctctaccccattaatcgcagggcatgttgctatcttaggcggttgggttcgagatattactcatggtgaaccttctggcgtcgttcgtgcttatgatgtacgtactggtaaactagcttgggcttgggatgtaggtaattcagaattatctggacaacctaaaaacggttttactcttgaaaccccaaatatgtggactattccaacctacgacaaagatttaaatctagtatatctgcctactggaaatggtccacctgattactggggcggtgatcgtaatgcagcaaaagaaaaatttggctcagcagtagttgctgtagatgcaacgactggtaagactaaatggtcatatcaaattgttcatcacgacgtctgggactatgatttaccttctcaacctgttctttacaatgtcaccaatgataagggagaacaaattcctgcccttattcaaacaactaaaatgggacaaatttttgtattagatcgacgtacaggccaacctattactaaagttattgaaaagcctgtaccgactacaggtcatgcagaaggagaaaaattatccccaactcagccatattctgtgggtatgccacaaattggtaatgacactttacgtgaaaaagatatgtggggtatttcaacttttgatcaactcaattgccgtattcagtttaaagattcggcctatcaagggctatatacaccacctagtgagaaaccatatattgaatggccaagtttattaggcggaatgaattggggtggtatttcaattgatgaatcaacaggtttaatgttcgtcaatgatatgcgtatgcctttgcggatgtctttagttcgtaaagaagatatggggaaatacaaaatatctaccgatgaagttcctggatttatgggaacagtacgcccacaatttgcaggtccgtacgctggagtaaaaattgacattatgcaatcagcattaggcgtaccttgtaatcgaccacctttcggtacaatgtctgcgattgatttaaaaaccaaaaagctggtatggcaagtaccattgggaacagctgaacagcttggtccattaggtattaaatcacatctcccaatgccattaggcatgccaacactaggtggcccaacttcaacagcttctggcttggtattttttgcaggtacgcaagattattatttacgtgctctagattccaaaactggtaaagaagtatggaaagctaaattacccgttgcagcagttgcggcgcctctaatttacaaatcaccaaaaacaggtaagcaatatgtagttatttctgcagggggtgcgagccactcaaaagatgtaggtgactatattattgcgtttgctcttcctgatcagaagtaaccgaaattagccaaggtagacgtctaaaatttagaaatttaattttggcttaagggtaatttggtaacttttatcttgtacaaaacagtaaaaagctggcttgttcccaagccagctttttactgttttgtacaccagcattgaaagatttatcttatcattcaactcaacctaagttttttatttaatctaccaatttaaaaccagccgcttcctctatatctttcaaatacttatcaaaagccactctcaaatgtttagccttaaatatattcttactccaaaagaaaacatttaaaagtaatctattacttaaaagccacgctcttgctgaaaataaactggcattattagatttatcaaatttagccctaaaagcatatgccttataagttagcagaaattcatctttctcagattctaaaaaatctaaattccaccattgtccccatctataaacataacttttctttccttgaagaaaacctaaattatctacaggattaaatatagatttcgtattattttttagatttatataagtattatctttatcaaaaacttcttttaactcaatcttaaattcattataaggttcatacagctggccatttctccactccaaatttctaataggaatacttggtaaagctaaaacgcaaggcttactcgttaagtcatgaatctctatcacagattgatattttagattacttaaagaagcagtaacgcaaaaaataactttactgtaatgttggtcattatttgctttcacccatagtgtgcaattagtctgctgctttcctagaaaaatttgattccaatttatactataatttacaaatccccccaaatccttacgccacaatagttgtaggtctctagaggtcctatatgcagttgatactttataggcatctaaaaacaaaaatttagtaatccattctattggtttttttaaaatcgggccaaagatagaaagaatgatttttatagcaaaattagttgcaaaatttataggttcagccattttataaactactcacttttatatattaaaaatatgatcttacaaagaactaattgaggaaaaagcgccgaaaaatggaaaaactcccaacccaataaaaccaaaaatagaaaaaatgtaaaatggagctgaaaatttagcagcatttaatatctgtatcattctttttaaataaacctcaaaaagcatataaaaaaagaagaacactcccattaaaagcattattatattaaaataataactacttattaatggtataaaatctggcaatttatcatatgaatttactatatgcttactccccaatataaaaactacaattgctgtaaagtgtgcaagtacagcatgcaaatataaattcaaaaactcttttttaagtcctaatttatcactattcatacattatcctgcttaaatggttagtacaaatattaataagaaattttattcttagactcaatccctaaactcacatagaacgtcaagatatgtcgcacttcaaaatttcatcttatgtgtcgtttttcttaaaaaatgtcatcttatctgtcgtattttcatgaaactcattgtcgcttagctgcctaattctttgttctataaaaggcaccaatgtcaacttatgtgtcgcatgacggctttcccaaaaagccgctcatctagagtggcttttttattaccagaattatttaggctcagctcaagcctcatttatttattctttattcaataaatatttaataatttatacaaggctgttctgaacttaatcctatataagttatattcttttaatttaaaaataaataatataaaaatctaaataatttataaaaacaatttaaaatactaaaataaaaattattgttttaaaaagaattttgttaaacaaataaaataaggtgtcggctgacccactctggcttttaaacgaacgaaaactcagccgacggcgtagatataccaaattattattacaaaaacttatatccctacgattattttacaaatccgaataaatactcaagtaaaaatatcacaaaatttatctatattatttttgtcactctcattatttaaagcgatagctttaaaccctataaataaattaaatttattttaaaaacaaaatgttatagacacagtcattttaattttaaataaaaattattttatttcaaaaagataaatcattttttaaatacatatattattttaatcttaaaaattttttattaactcagcccattttttatgtttaaaaatgttattaaaaataatcgtattttttattttgttgattttgaatatatttaaaaactcactgtatcagccgtgaaaaattacacaacttgacaccaaatagtaaaaaattaaatactctttctcaattatgtgctctaaaacacataatcaataaatagtaataacaacatctcaaacaaatcacatggaaatagattatgtttattaaaagtattttatcttcgattactagtattatcccacttcctgaaaatagtaacacaagcagtaatttaggtaacggctctggtgacggcctacttaatggaatatcttccggaaatggtgaacacaactatggtattggcaatggtattgcggatgacgcaagtattaccgccccaattaccattcccctcaacctatctggtaactcaattactctcataggcaattcatcttcaagttcggtgaatagctctccaaccaccacttcaaataacgttaatgacaacgacgtaacgaataatggtaacggctccaccattggtagtggtacaggcaatggctctggtgacgggcttttaaatggcgccgcttctggtaatggtgaacacaactatggaatcggtaatggtattgccgatgacgcaagcattactgccccactttcaattccaattaaccttgcgggtaactctattaccctaattggtgactcatcttctagttcggtcaacaactctgcaaccaatacatcaaataccgtgaatgataacgacaccacctataacggcaatggctcaggtgctggtaatggttcgggcgatggcttgttaaatggaattggctctggcaatggcgagcaaaactacggtatcggaaatgggattgcggatgacgcaagtattacagccccaattacgcttcctattaacttgtctggtaactcaattactctaattggcaattcatctgcaagttctgttaattcctcgccaactacaacgtcaaatactgtgaatgacaacgacaccacctataacggcaatggtactggtgatagcggcgtgaacgctctgggcggttccggcaatggttcaggtgatggcgcaggtaatggtatcgcttctggcaatggtgaacataactatggtattggcaatggtaacggcgacgatgttgatattactgctccgatcactggtgttctaaacatttcaggaaactcatttactctcattggtaattcttcatcaagttcagtcaatactgcgccaaccaccacatcaaatacggtgaacgacaatgacaccattgataatggtaatagcggcggcacaggtagtggttcaggcaatggctctggtgatggtttacttaatggcgctgcttctggcaatggcgagcataactacggcattggcaacggaaatggtgatgatgtagatattaccgcaccaattacaggtgtttttaatttctctggtaactctttctcactcattggcaattcatcttctagttcaattaatactgccccaactacaacgaccaatacagttaatgacaatgacgtgactgataatggaaataatggaggcgggcttcttggtggaagttctggaaatggctctggtgatggcctgttaaacggcgctgcttctggcaatggcgaacacaactacggtattggtaacggaaacggtgatgatgcagatttcaccttccctcttactggcgtacttaacttttccggcaactcgctttcaggctttggcagttcatctagtgaatcggtaaatgttgcaccaaccacagcaactaataccgtcaatgataatgacaccattgataatgccaatacaggtggccttggtggcggttcgggcaatggctctggcgatggccttttaaatggtgcagcgtctggtaatggcgaacataattatggcattggtaacggaaacggtgacgatgcagactttacgcttccatttactggcggtttaaatattctgggcaatgctttatcaggtatcggcggttcttccaccgactctattaatatttcaccgacaactacttcaaacacagtcaatgacaatgacactaccaacaatggcaacacttcaggtggtgtgattggttctggcgactcaggcaacggctctggtgatggcctattaaatggtatttcatcaggtaacggtgaacataattatggcattggcaacggtaatggcgatgatgttgacgttgttgcccctatcactacaccacttaatgtattaggcaactctttctcatttattggtggtgaaggtacaggcgatatcttaggtccgattactggcattattggtggtattggcggtgatggagatatcctaagtccaattactggcattatcggtggtattgatggtgatggagatattttaagcccgattactggcattatcggtggcataggcggcatcggtggtgatctaggcgataacccacttacaggtattattcaaagcggtattgacgttctacaaaatttagaaagtttaaaaacaggtttgattaatacaggtattgatacgattgccggaacaattattggtgtgttccctgatgcagagcatcctgtcggcgattttgcagaccttggaaaactacttttcgagacttcacgtgatagtgttaacggtacgcttgaggctatttctgaccttgcaggcgctgaccttgagggtgcaagtggctcgattactggtgtaattgatactcttattaccaatggttcaacggcatctaccattattcagcatattgtaggtgatgacctagtcactgaaaacggtggcctcttgggttcaatcaccacgattattggtggtgttgacagcggcgacggtggtttactgggtggcctagatggcttaattagcattaactatggtgactcagacaatagtaattctgtagatgtagaagatattttaggaaatatcctcggctcggtaggttcaaatcaaggtattgctgttggtgaacctgatccaacgggcggtagtttgattcatacgatttcacttaacacagtaaatcagttaactgaccaacttttacatgctttaccaactgtctaatgtgttcgtaaagatataacccctataaaagcacctttcaaatcttgagtttggaaggtgttttttattaaagagcttttgacagtaatacgctcatgcttatagaccattaatccagatctaaataaccaaatacagccttttcaactcgctgttgtaaatcatttaaattgctttcccctgctatacctgccgcgttaatcattcctttacttaaagcaattacatcttaaatggatatctgagatgatggacttacataaagagaagaaattctttggaatacgcaagatgccataatttctcaaagatcatcaatcttttccagagtacaaaactgagccaactagaatcgcttggcctgcaatgctaacgtgtaatattgaatctattttctcaactgtcactaaaactcgccctggtttttttattgcgagaccttgatacccccaatagcttactttctggtcacattcgattaaatcgtggtgaacaaggtacgctcccgctgggccatttgcattaccagttacaggatcttcatttataccgattgcaggtgcaaacattcgaccataagtaataggttcttgcctactcccttccaagacaaaggggaaaaaaccattgcaacctatttcagcactaatagctttcaattttttattgtttggaattaattcatcgagtttatttctgctcaacattggcaccatcaccttggaatgccccgtcgtgacaacttgtattggtaaatccgcaaaatcactttcactcacaccgagtgcgcttgcgagttcagtccgttgactctcattaaaaggtgataaaaactctacacgaccttgagtcattttcaccagtaactcttttgaactaccaaatattgaaacgggtaaatgaccagctcctgtttttgcgattaatggatagtctgattggtggcctgtagttgcacgtaaaaaatgagttgcgattgtggcatgtccacagatcgggacttcatgtgtaggggtaaaatatcgaacatgtatatcatggctctgatctttcggtgacaaaacaaaggcagtttctgaataccctgcaaatgcagcaatatcttgcatctcttgagtcgtaagatggtccgcatctagaacaacccctgctcgatttcctgtatttggtttagtggtaaatgcatcaactacataaatggtcgtcatggcagaactcctctgttattaatattgtgatctcagaaatagctcctgccataaccagaaaatcttatttaattgcagcaagacatatcaccgctcaaaaacgtttatggtcgtctcatataatgagttttgagtctttgcaatggttgtttgaattgtataaatctaaacatcggcgatactatagtttttattgcaaacgcattttctaaatatggaaaggtatgaactgggacgatactaaaattttgttagctattgggcgaactggcgggttgagccgcagtgcaaaattgcttggtattagtgtttctaccgtacatcgcagagctgttgaactagaaaaaagtctcaatgcggttcttttttctcgagacagtgatggctatacactcacccatgttggaaaacatttttttgctttggctgaaaaagctgaagagcatttaatagcgatggaacgttacaacgatcaagggcaacaatcattgttccgcattgctttacctgagttaattgggcagcagttgcttcaatcaaagctaacagcattgcaactcaagcatccagatttacaattagaaatctcaacaagtgtcgttcctgttgatttttcccgacgggaagctgacattattcttcgacttgtccgaccagaaagtgggcgttacattattcggcgacttggtcaactggaatatgggctttattgtagtaaagattatctcgccagtttcacaaagcatgctgaaacggctgatgatttactgaatcatcgtataattggttgggacagaagccttcaatatacgtttttggcacaatggatgcgtgaactcactcaagacgcggcccctgctttgtcttttgataacatgcactcgcaactattagcagtcattgaaggacaaggaattacagccctgccttgttttgttgcaaaggctttgggtttagtacctatactacctatgcaaactttaaaacaagatgtgtggttaatgcgtcatttagatactaaggatagtgactattcaacgttaattagtgagacgattgaaaaagagctacaagaatatctgttgtgattgatgcgatacgagactctgagttttgtacagtaccctactttgagttcgtagagattattcctgcaattgaagatgggtacgtggaatatgaaagttctttgtaaaggtttcaaagaaccttttaactttgtactaacacgaaagcatttagtagtgtctttaaaataccctactaaataattatttagatttaaaaatttcgaaatttaatctgtatgtcaaaaaatttatcaaacatgcttctctaattctttctttaaataaatcttgaaaccaaaagtttgttaaaaaagcaacaaaaaaagttataaaagttctaaatgaactattttctaatttatacacctctacaatactatcaaaaaaactctcaattaaaacaaagaaagaagaagttattgaagatataactatgtaagaaaaaatcttataaaatttttctgaaagcataactatttctccaaaaacttcaaagtttattattaaaaggttattaaatatagttacaaagccgcaagaaattttataaaatatgacctaaaataactacatacttgtatataaattcttaatagattttattcatttttcacttcataagatttaacccatttagcccaactattcaatttattgcctgaatattgagtagttacatcagtccattttaaatcatatttttctttaagcaacttacctaaagcctgtcctgatagtttatcagcagaatatagctctttaatttcaagcatagcttggatactaaattctgaattagctttagcataaaccacagactcaaaatctttaatatctaaaataaattcattatctattaattcaaatttttttaaaatttctaaagccttattagttctaccatcatttattaattcttgaagattcttacctgcaatctgaggatatatcgatataaataactgaggtgtaattcttggcacaaaaaagttagaagtacgtcttctactcatcacagaagttttgggacttcctaaatctttataaatccatgtatttggctctgtagctggctgtaagaaacctgttaattctaaccagcgaataagtctaatagtataagatctccaagtcttatctgcatatttattatcaggataagtttctttcattaaatctatgaaatttgtaattgttaataatgttccacttgaaaggtcttttagatgtaaagtaataatatgtttcttaaatttttctctaattatattcagaatattctcttgtgtattttcttcttccaacaaatcttccgataatacatattgtgagttttctctagttgctaaaccaaataataaaacatcagttcctatattttgaattgtaccctctgaaaaatcagttttttcctgcaactgttgaatagaaattggtttcttagacaaatactttacaacattccatattgttgaaaaatcattagaaggcaaatatcttaatgagataataggaacagtctctgttaaaatatactctctaaatatatcccaataaatatttaatctaataccactttttataattaaacgtttatgcagtaaacttgtaactatatcttcaccacacgtatcaatagtgtcaactaaatcaactggtgctttctgggcaataaattttagagcttttatttcattagaatttagctcttctaaatcacttgcaaataaactagatatatccagtttattatctaatagatcttcttgtttttggccagataaaatcttctcatgtaaatggatacataatttttttaataaccatggatatccctgactactaacaattaaattatgccttaaatcactatggattttttcaccaattacttcctcaaacttattaattactgcatgcgactccctatctgaaaaaggatttaattttctaacaatccgataatctgataatctatgccaaaagaaatatgcattatgttctgaaggcattgtactatcagttttccacgcaaacccaatacataaattagcttttaagctagctgcatctaataaaatattacttgcattattaaataattccaataaatcaggtttactaaataattcttcgaattgatcaaaaactaatactatgagttgtttcgaggtattaagactatttaaatattctgctatagattctgattctagtggatgattaacatttgtaatttgtaaatcaatctttgaattaccgaatcccttcttttgtgcttcttttagtgtttttaataatgcggaatatatatagtcaggagactttgctgcccttacatcaatagcatataagaacaacttttttttctgatgaagattttttgctttttcagaaagggtaataattaacgagcttttacctaaacctgaattaccagtaattgcgaaaattcgtgtaccgatttctttttctcttatttttttaaaaaaatcaaatatttcttttatatctttcgttctcccaacaaagtcttgaggtcgtgcaggtcgatagtcattccaatcctcacctctttgcacttctactacttctatttgggaatcaagagaacttttaatatctttctttgtatttataagtttggaaaagtctagtttagatagactacagtcagttgaggcaatattatctaaaagtgcctgatcttcgactaaagttccagtcttagcatgataacagataacatttgttggtatacctgcatttaagatagtaacagcccaaaaaattccaaaacttgttattaataaataccattctccaaccttattcagatcaatataactttctaaatgttcttttggaatattgctaatgattctagaagattgtaatgactgaacaatatctttaggagtgtagataattactcgatttccatgaggtcgatttggtaactcttcacaaagcccttttgcatccttactaaaatcagaagtcccaattagccatccttcgtcatagtcctcaaatacaacagtaccaagtaactgtcttattatcgtcgcatcaatctttttatcccgataggctttacattcaacataaatttttttcttagagacattatgcttacatagtaaatctaattcacttcctgttttacgtacttcttcatcaacatgataattttgagcttccagcatatttttacttaatttttcaagcaagtcgcctttatcttttgttgtagctgaattaggagtacaaatttcaatgttcattataaatactcaagatttaataatttttcatgaagtatacaataccaaaactgatctatatctaaaaatacttaaaaaatagaagttttactttccagattaaaagtaaatttatttttagaaaattaaaactctcacctttaagaatataagttaaagagcctaggtgttaaatttataacacctgcccccaaaacttctccaaaaccacatctcgttcatccaaatttttagagcttaaaacctgtagcatcaggccatctataaggtttaaaaccatgtctgcatcaaatttaaaagcacgggtctcacagctaaaaatcaggtcaaaaagctcccgatgtagccattttcggtattcaactgccatacggtaggcttgcggatacagccgttttatttcaaaaaccgctttaagcagcaaatggtacagactgtttaaattggtatgtaagacaataatttctttaagtttatctttttgggtgtagtaacggcttgagtaaataatcgagagcacttcttctttgagtaggcttttttgaaaggcgatgcacatttcaattaggcgttctttggagtggaagtagttgtaaaacgtggctttcggtattttggcttctttgataatgaggtctacccctgcattatggaacccatgcgtggtaaagagttggattgcggtttggaccacctgtaattttttggaaggtatttctaaagttggcatagttttaccgttataaattcttgttgtttctaaatgagataaaaagcctgtgcccttttgggagaaaaaaggcacagcaaagccgtaagacggtgcttggcacatctcaagttttattgttgatataagtttttagccgtaatgacttaaagtctgaaaagcggttaagcctccaaactgtttaaagatgaattaagtggtgtcgttatagcttttggcactgagggccaagaaatgatggatgtgcatagccaactcctgattttgggagttctgccaaagcattcatttggaattatggtggcagaacgaaagagggttagcagactggcttcgagaacccagcacacccgaaggtgtcccccttccgtcctaccgctacaaaaagggagacgagtgggtctacatcaaaaaaacgagttttttcaatgtcctcaaagatcggtctgctaaaaccggctggcaatgtggccagcacgcaaagcataatctgagagttaagatgtgtcaatgtggctttaatgacaagtgattaaatttcttattgtttttcattagattaacttaattattatttaagatattatatttaattgtatttttaaaattaaacacaagcgatccgtgcttattgatttcttaatgagtcttttattatgaaacagcgaaatgataagtaggattagactgtctctgtctgccccacttggtgataagcacggttaaagtaaaccaaactttggtcatgttggctttgtttaatcgccacaatcgggcatataaaaatcgtgtgtgtgccgacttgttgaatttgctcaatctcacaatcgaagctcaccaaagcatcttccaacacaggtgcgcctgtttctaactcaatccattcgccatgtttaaagcgttcttctggtgtgagcttagatgaaaatgcttttgaaatatgttcgtgatgcgcgcctaacacatttacggttaagattttgttatctaggaaatgtgcatgtgaactcgcagcttggttcatacagaccaataatgtcggcggtgtgtcagtcacactacaaacagcagaggcagtaaatccaaaacggccagacatgcctgccgtggtcacaacactaaccgcacttgtgagtaaagacattgcatttctaaagtctgttgcttgaaccatgacattattcctaaattgaaccgtaccttttcctgtgtgtttgctataccgcccaactccatcaggaaggtactatcgacatgcgatctgattagagcgacatgtagtaagtaaaatgagggttacttgtttgattatcaaccaccatcaaaaaagtaaccctttataccacttattggtaaatattaagcagtaagatcataacccgtcagttctcggcgaacgatttctgcacctgcacttaaggcatttagtttgccgcgtgccacttcacgagaaagaggcgccataccgcagtttgtgcacgggtaaagcttgtctgaatctacaaactgaagcgctttacgtagtgtgttggcaacttcttccggtgtttcaatctggtttgttgcaacatcaattgcacccaccatgacttttttaccacgaataagttcgagtaagtcgattggcacacgagagttgtgacattctaacgagatgatatcaatgttagaagtttgaagtttcgggaaagcttcttcgtattggcgccattctgaaccgagtgtctttttccagtcagtattggctttaataccgtaaccatagcaaatgtgcaccgcagtttcacattttaggccttcaattgcacgctctaaagttgcaataccccagtcatttacttcgtcaaagaagacgttaaatgcaggttcgtcaaactggataatatctacaccagcagcttctaactctttcgcttcttggttcaagattttggcaaattcccaagcaagcttttcacggctcttgtagtgaccatcataaagcgtatcaatcatggtcattgggccaggtaatgcccatttaattggctgatcagtttgctgacgtaaaaattttgcatcttcaacaaatacaggcttttgacgagacaccgcacctaccacagacggtacgcttgcgtcgtaacggtcacgaatacgaactgtttcgcgcttctcaaaatctacgccattcaagtgctcaataaatgtcgtcacaaagtgttggcgggtttgttcgccatcgctaacaatatcaatgcctgcaagtttttgctcgtgaagtgctaaacgtaacgcgtcttttttaccttcaactaagccttcgttttcgagtttccacggcgaccaaagcttttcaggttctgcaagccaagacggttttggtaagctgccagcagttgaagtcggtaataactttttcataataaatgacctatatgttgattaattaggagcgtaattcgcagaccactgctcaagaatcgcttggtatggtttgataaattgctcttcaacaaacttcccctgctctatagccaaacggctacgttcttcacggtcatacacaattcgagtaagtgaataatcttggtgcttcaagcttggttgataagattttccagccactgaatttgcattgtaaatttcaggacggtaaatcttttggaaggtttccatcgtactaatggtactaatcaactcaaggttggtgtaatcactcaacaaatcgccagtaaagtagaacgctaacggtgcaacgctatgcggcggcatgaaatagcgaacttttaagcccattttttggaaatattcatcagttaatgaatagtcttcttgcttgtattcaacacccaaaacaggatgttcgttttcagtacggtgatacaccttacttgttgaaacgcttaagcaaatcacaggtgcctttttaaagttggctttataagtctcagagttaataaagctcttaaacaagttgccgtgcagttcaccaaacttttctggcgtgctaaacgtagacttgtttttgttgtggtctaacaacagcacactaaagtcatagtcacgtacataagaagagaagttgttgcctacaataccttcgatgcgttcattggtctttttatcaacaatattggttttcaatatttcgattaaaggaagcccgctagtacggttttcggcatcaatattcatttcaactgaaatgatttcaagttcaaccccatagcggtcgcccttagggttgtcccaatgagctaaggcgttgaaacgattgtcgatcatccgtaatgtgttgcgcaaattttcttcgcggctcatccctctcgccaagttagcaaagttggttgtaatacgcgtattgtctgctggacgatagttctcatcgaaacaaatactcttaatcgtaaatgtaaattctttactcattgtgatcagtaccctaatttctgagataaacctaaaaaatctttttgctctttttgaactttccagccttgtcagttttgtgccttgtggtcttatcaaaagtgaattactggagcgcttcagagcatggatagatttataccgcaatcacaacatgaataaaaatgatttagtctcattcaaaactgagtgaaattcatgtttagggttttataaataagtatgaaattaaatatttttcatcttagggaattttagacaacagaagttcaatgtatgacgctcacatagcgctttaatcattctaaatatttatcattattttcagatatttattaagaaaaattcaattttagaagaatcaacttaaagtaatgtgtgctgactctcattcatctctgcttttagccattctaaaaatagggttttgcgtggatcttcctcaaaagcacgatgagaaagtagaaaataggctgaaccatcttgaacgattggtgaatttttttgcaataagttccattcaagctctttttcaatcatataaattgaaatgaccgtcgcgccgagtcccgccaaacaaccttctaaacataaataaaaatgctcgagttcaactttggtgtagccttttaagctctgctttaactcagcaatgcggctcatgtttttgaaaaaatttggtctagaagtcgaaatgagtaagtcgtttgtttccgatggcttggttgcttgaactagagcgatatattcatcggcaatcttttcgctatagatatgctctccccaatcaaagtcatttcgacgaatcgcaatatcaatattatctttttcaaaatcaaccacaccgcctgctgtgagtagcacaacctcaaaatcatgcccgagctttttaaattttgataaccgcggaatgagccatttcatagaaagagtcggttcacaggacaaaaccagttgcttgttttgagttttaggctggctgagttgtattaaacattcatcgagttgaccaaacacctgatggcaacaactcaataaagtttcaccctgctccgtcatcacaagcgttttattttttcggtcgaacaaagtcgtatttaaagcttcttctaaattataaatctgtttactgaccgcactttgcgtcacaaataatttctttgcagctaaagtcacgctgccatacttcgctacaaaatagaaaaattttagtgaattcagcgatattctttcaatcattccaaaaactcataattatgttgtcgtttttatcgatttttatttttaggtttctgttcaaaataaaaatcatctttattaaaacctattttagatgatgaaaaacatattgaatatcgatatctatcttcacacatataaagccccaatctttctcaccaaaagaatagcagctttaagtagaacagctctcgtctcaaatacattccaaaaagtacagagcattcccctcgttttcagtgaaggggcaaaataatggcagagttcattgcggttattctcattacaattttggcagtgattagtcccggagcagacttcgcgattgtgaccaaaaatagttacttgtacggcagaaaaataggtgtgttcacttcacttggaatatcgcttggtgtgttggtacatgtaacctatacattagtcgccgttgcctttgtgatgacttatacgccgcaaattttgaatattgttaagtatattggcgcgctttacctgatctatattggctataaaacttttactcaaaaacctgttttagactctgctgctttaaattctataggtactcttcaagcgataaaatacggcttttttactaacgccctgaaccctaaaaccacgctatttgtgattagtacctatacgcaaattgtgagtttaaccacgcctaaaaccattcttttagcttatggcttttttatgtcttttgctcattttgtatggttttcactggtggctgtactgttttcatccatactactgagacagaaaatgttagccaagcaagtccagattaatagggtgattggttcaatcttatgtgtattaggggtgattctgctttttactaagtttcagtagagccgcttaatttttaagaaactctatagtgagtttatggttaatggactgagcgcttcgtacagaactcagtccatttgagtgagataaaaagctatgttttaactttttgactctgataaatcatttatgttccaacgatttgctcttttaaaggttccaacatcgttaaaccgtactcccatatcacgcatgactttatgggcaaccggtgccgtcatttggcgaatgtagaatggttctttcaccacaaaatggtggatggcatgcgttgaaccaaagttaaagcaaaacagttggaacggcatcatccaccaaggttttaacacctgagtttgctgaatgacattacccaattcgacatcgccgtagtaatgcatattgctagtcacaaagtgcaagcagaaggtacgcagtacattcggtgcaacccaaacaacagtcaaaatattaaccacatgcataatatttaaagtggtagctgaccaagcaatcggtgcattcgcccaacttaaaacagcatctactgcatgaaaacctaaaaagatataccacagcgaccaatgaataattcctaacggaaaataagccataaatgcacgtttaaaaattacttttctcaccgtccaattgcttgcagaaataatacggaacaagaccgccaagccgttatcaccaatcgcgatgagtcgacgtatgctccactgctctccattagttaaagctctttcttctaaatcaacttcggtgcctgagtttttatgatggttaaaatgcagctcacgacgcttccacgggttaatggtacttggtcgagctaaccagactaagcccatcattaaatgatgtgcccatggtttctttctaaaatacatccagtgaatcaggtcatgctctaactcatgggtgagcgatgcgaaaaaagcaataatcggaattgcaaaccaagctgaaagttgatgatttatatagagcacggcagtcgctatcatgccgaccaaagatataaatagaatcatcgccccaatggcattttgatggttcaaaataggatgacgtttgcgtaaagccacgccttctgctgttactacttttttaatatgttccgttttttcgctatcggtcattccggcaggatttttataaatataggtcatccgttattcctcagtttttcatgcctctactttatttagatcaccctaagtgtgcttagctcgaaacgccaatctattggctatggatgccaaaataaaaagattcagaataaacaaaagattttttagttttgaatcttttatactgttcagaggaatatgaatcacaagttataggacataacatgccacagacagcaacggcactggctagctgggtgaaagcgattcaaaaagcgctcgaaaaagccggtgttgatagtcaacctttattagaacaagcaggtttagatattcaggctctgagtaatcctgatgcacgatattcattaaaacaaacagcaaatttatggaaattagcagttcagaaaactcaagattcatgttttggccttaaagttgccagccaagtcaatcaaaatacttttcatgtgttagggcattcactgattaccagcaccaccctaaaagagatgtttctaagaattattcgttattttcgtgtggttacggatattccagagctagagttttatgggcaaggaaataaccattatttcgttattcatgttcccgacgaagttcagcccgaatctatcgatgcatttatttccgtttttattcgctcaagtcgtgctttacaaggctctgttttttcgccattacgcattgaacttagacgttcagaacctgaagatttagaaacattccagaatattttaaaagctccgattgtgtttaatgcacccaaagacatgattgtgtttgatacagcaaccatagaacaaccactagaaggtgcaaatcccactctcacccaagaatatgatgaaattattaatcgttatctggcacggttcgataaagaaaatatattggcacgagtgaaagtaaaattaatcgaaaaattatctacaggcgactttcagcaacaagaaatagcaaaaagtttagggttaagtattcgtagcttgcaaaggaaactctcggcagaaaacacttcatatagtgaactgttagatgacacccgtcatgaactggcactttcttatataaaaaacacaggccatagtgtgactgaaattgcatatattttaggttttacagatgtcagtagttttacacgtgcttttcgacgttggaccgatttatcgcccatccattatcgagaaaaatatctagcttgctcttaacttttaaaaacttagaaaaaaagatgcatatgaatgcatctttttttatgagtaacttactttttagtgagtagttctaacatcgaaactgtagtgaccttggcaccaactggcaaagcttttaagtcaacaatgtagtttggactatgtggaatataaggcacaggtttgccttgtttgactgcatttgcaaacacaactgggtctgctacaccaataaacataaagttaaaaggaatgtctttttggtcgcctaataaatgatgaacatcttctgatcccataaccgcgggatactcagttagaacatgtttatcgcccaatagtgcttttaaaggcccatttaaacgtgccgaaaattctttattgttaactacaggtgtgctcgaacctttaaacgtaaaggtaggtaattgatctttacccatcccctgcatttgggccgcaccttcactcatagacttaatattatttagcatggtttcacgcactttaggatcaaaccagcgcaaattcattttgaccaatgcagtagaaggaatcacgttattcgagtttccagcttggattgagccaatcgataacactgccgcttgttgcggatcaactgcattacccataatggtttgatattgagtcactgcgtttgcagccatgctaatcgggttcttggtgagcattggtaatgaaccatgtccacccacacctttaaataaaacatcaagctgatctgttcctgccatacgtggccccggtgcattgatgacaacgcccacaggtgcaggtgtggtatgtacggcaaagaaataatcaggttttggtaagttgtattttgtccataaaccgtcagtcaccatagctttagcacctgttattggctcttcagcaggctgcgcgactaaaataacagttccgttccattccttttttaaagcgactaatgtttttgccatgctgagcatccatgtcatatgtgcatcatgaccacacatatgtgctacgggcgtttcggttccatcatcaagttttacgcgcactttactcgcgtatggtagaccagttgcctcttcaacagtgttggcatccatatcggcacggtacataaccgttggcccttcaccattttttaaaatgccgaccacgcctgttttggctattcccgttttaacgtcaaaacctagtgacttaagctctttggcaacaatggcagaagtacgcttttccataaacccaagttcagggtgttcatgaatgtctttatagaccttatttaaccactcggtttgcccatcaataatggttaacgctttttgtgaaactacgggtaaatttgttggacttgcttccgcatggagaagagttccataacctgaaatcaaagtcgacaaccctaaaaacataccgtttttaatgattttattcatgtaattaaaaccttataaatgactgatttaattttaaaatttatatccaatttttaagccatagcttactgagtggttatccttaaactcacctacataatagtcactacccgcctgtgcgccaagctgagcttttgcatcgcctaaccagtaatacttcacaccgccagaaataaagtattgcgatgtcgggctatattgagcacccacgcccaagttgtaatatcccttagttgggccacccgttgacactttatcgcctgctcctgagtcccatccaactgacacagaacctaaccattttggcgaaaaacgttgtcctaaacccaaatttaaagaccattggtcgtcataataacgaaccaaattaaaaccttccgggcggcttggcgttgatagtacgccaacaacttttgagatctcaccaaagcgataaggctgtagagcgagatcactccaatttacccagcgtaaactaccaaatagtaacgttccctgacgcagtccagtctggaactccaaattcactgaatcaggagatttaaattttgttgtacctgtatcttcttgttctggcaaattagcaataatctgatttaagtaagctttcttttgtggagtcatctgaccaatagaaatcatgtaatctagatgctgattaactaaatcacgaccttgttgagtgcttaacatatcaattaaaggagcgttttcagtcgcgtttactttatgggtaatggctgaacggtaggttaatgagactttcacagctttttctggaatttggtaagcaagtcctgctaaccaccctaaatcactgacagttttagtatgaaagtcatatccattatagagactaaatacattaccccttaattcaacctgacttttaaaagtttgatagactggccccgcataaagattccagttttttgtgggttggtaacccaaaatgaagcttaaattttgtatatcaaattctgattttgcatttcctgtaggagcatggcccaatgtagcgctggcaagccctgtggttgtaattccaggtaacataacggtatctttaggcgttgcaacgaagccatttacacctgaatattccgtgtcagcaccaaaaggctgatcatataacagaccaaatgaatactgcagtgccaactgtagttttaacgctgccgtaggccgataatcggtattggcgatatctgaaattgaatgatgtgaagggttggtacccgactctacaccacttaaatcggcatctgttattcctaaacttgcttcaaaatagttgcccagttgtaaaaatgccgctacagactgccctgttttatcaaatgcagcagcatgtaatgtgcttgtgcaaatcgatgctattcctaagataaatatttttttattcacaacaaaattcatagatccatcctggatatttttttattttgattcctcactttatgtagatttgaacgattatgcttagctcaaaacgccaataatttgaccgtagatgccatattgaaaagttatagtttgtgtagctacaacatggatattatttttcaatcaccctaaaaacgattgttcttttaaaatgagaagttattttttttaagaactttttgcctgtattgctgttaatattaaaacgcatgatagatttcccaatccttcatatctctataaatcaaggatgatgagcgaatacatttattatggaaatcaagcaaataaagtattttttgacggtcgttgaatcaggcagtattggaaaagctgcccaaaaactcgatgtgggggcttcggcgattagtcagcaaattagtaagctcgaacaagagttaagcattcgcttattacagcgtaatgcttttggtgtgaccccaaccccagcaggtcttgcctttttaaagcactctcaacttattttgcgtcaagtgaacttcgccatagatgctgcacattctgcacgactgtctggacatgtcagccttggttttccaccgaccattaccgctttaattggcatccctttaatgaaattaatgtctgaacgttacccagacattcgtttagagattgtagaaaccctgtcggggaacctgattcagtcgattaattcgcgtcagcttgatatcgccattatttttaccaatgaaattgataaacagtggtcaattcaacccttggtacgcgagcaaatgtatttaatggcacgcaaagaagtgctcgaaaaatacggacttagcgaatgtattaaaagcggaattattcagtcgcagcaaattggcgatattcctttagtgttgccacgtcagcgtcatagcttaagaaaattgcttgagcacaagattgggcagctcaatgtcgtctatgaaattgatggcttgcatttgcttatggacagcctgattcatcttgaccttgcaagtgtgaggcccggtagtgcttgcttacaagagtataaacacaagctgcaattgcttaaggttgtcgaccctgaagttgaacgaattaactatttggtgagccttgccgaagaagaattatcacctgccgcacttgctgccaagtcagccattaaggcatgtgtgaaagagttgattcaaaaccagatttggccatgttctgaaattattttataaagggtcattaatttttctaaatacctaattaattttctcctctcactccctcctgctttttaagattacattttccttcgaatgataagtggttttctgtttatcgaaacatagatgtgtagtttgaactggaaacaaggcatcacattttctacgaaggacacctttaaatctcatctctaacccatttcctatttaggtttattgattgaatcagtttacgtccaaaccttgaagatcgtgaatgtttccattttgttaggccaaggaggtctccaatggatgtcgttaataaccgtagggctacttttaaaaaaatattaaatgtaacgagtggcaactttttagaacagtacgatttttttctttttggtttctatgccacctatatcgcagcaaagtttttccattctgataatgaatatgtctctttaatgatgacatttaccgtgtttgctgcgggttttcttatgcgtcctctcggcgctattttcttgggtgcctatgtcgacaaagtcggtcgtcgtaaaggtttgattgtcactttaagtcttatggcaattggcaccatcttaattacctttgtgccgggttatgaaactattggtattatcgcgccaattttggtggtaattggccgtctattacaaggcttctcggcaggtgttgaatctggcggtgtttcaatttacctcgctgaaattgcaaccgataaaaatcgtggctttattactagctggcagtctggtagccaacaaattgcggttgtgtttgcggccttacttggttattggctcaacaccattttaactcatgctcaagtgggtgaatggggctggcgtattccattcttaattggctgtttaattattcctttaatcttcttgttccgtcgtactttagaggaaactgaagactttaaagcgcaaaaaactcatccatcttcaaaagaaattttcagcacacttgtaagcaactggcgcattgtacttgccggcatgatgatgagtgcgatgactacgacaactttctactttattacggtttacaccacggtgtatgcgaaacgtactttagaaatgtcggtaacagatagccttttagcaaccgtgtttgtgggtttgtcgaatttcttctggttaccaatgggtggcttactttccgacaaaattggccgtcgtccagtattagtgggtattacgactcttgcgatctttaccagctatccagttttaagctggttggtgagcgacattagcttctcaaacctacttattacccttgcttacttctcgttcttctttggtatgtacaacggcactatggtcgcaacacttgccgaagtgatgccaaaacgtgtacgtaccgttggcttctctttagcatttagtcttgcagccgcgatttttggtggtatgactccaatggcttgtaccttccttgtcgaaaatacaggtaatgcaagcacaccagcgttctggctcatgctcgctgcggtatgtagtctcatctcaagcttgtatttatgtcgtggttctaaacaaaaagaccctgacacgattgctgaacctgcaaaggttagcgcttaaaacaactcattccttaacctgaaattttaataaacagtacggctgaccttaaatctccgtactgtgctttcttgcaattcaagtgaggcactatgaaaaagtcccctatcttcataactatttgcctagctggtgcaggcttaggatctacatttgccaatgcagatacgctcgaagtaattagctcaggcggtttctattcatctatggaaaaactcattccaatatttgaaaagcaaactggtcacactgttcacctctcatctggttcgtctatgggggagtcaccgactgcaattccaaatcgactcaatcgtggtgaacgttttgacattgttgtgttggctgctcctgaactaagcaaactcgcagaaaaaggttatgttgacccaaactcacaaagcgctttggtgaattcaagcattggcatggctgtgcctaaaggtgcaccaaagccagacattagctctgcggcaaaatttgaaaaagttttattaaatgccaagcacataggctattctgcaagtgcgagtggtacgcatcttgaaaaagatgttttcccaagctttccacctgtcgaatacaaagtaatttcgagtaaagcagaaaaagtggtaggcgaccgcgttgcaaaacgtattgccgaaggccagtttgatattggtttccagcaaattagtgaaatcaaaccttttaccggcaaatatggtcaagttgagttagttggtccaatccctgcgccttaccaaaaagttaccgtatttgctgctggtattggtaaaaactcggaacatgcaaaagtcgcaaaagagttaattaaatttgtgaaatcgcctcaagcgacacaaattattgaagaacagggtcttgagcaggttaaagaataaaagctctaaaaggcaacattttgaggtgatgttgccttttctcttttagtggtttactcaaagcaatagaacaaaatctatagcgataaaccagtgtagaattaatccataaaggtcaaagtagaatttgccgtggaacttaaacaattaaagtattttattgcagtgatcgagtcaggaagcttgggtaaagctgcaaaaaatctcgatattggaacgtctgcattaagtcagcaaatttcaaaattagaaagcgagctttctattcgccttttacaacgtactgctttgggtacggttcccacccctgcgggtttagctttttttcaacaggttcaactggcacttagacacctagaccatgccatagactctgcgcactcctcacgtttaagtggccacgtcaccgtcggtttttcaccgagtgttgcagctgttattggcacacactttttaaaactgatgagaaaccgttaccccgacattaaagtccgtttaatcgaaggcttatcgggtgacctcaaagctttagttaatgcaagacagctcgatgtggctatcatctttagtgatgatgtcgacccacagtgggccatacaacctttagtcaaagaacagatgtttttaatctcgcctaaagaagtactgggtcagtaccatcttgaaagctgtatcgacactcaaaccattactcatttacagcttaaagaacttcccctaattttaccgagccaacgacatgggctgcgcttgttgcttgaacagaaaattcatcaacttaaagtggcatatgaaattgatgggctgcatttgttaatggaaagtattagccaactcgaaatggcaaccattcaacctgcgggtgcatcgttaaactcgcggcaagacctgtgtttactgcgcgttgtagaacctgctattgaacgcattaactatttaattagtctctctgaagaagaactctcgcctgctactttagccaccaaagtagtaattcgtgcctgtatcactaacctgattaatgaaaagcgctggtctggtgcggaactcataaacacttaagccattagtgtttatttttactaaacacccattcaagcctagcctctcacttcatcttcccttttgaagctacattagccctagctgagaaagggagaaatccatgcatgatgtaattgtgattggtggtgggaatgccgcactgtgtgccgcgctcacagcaaaagaaagtggtgcttctgtactggtaatagaggcagcgcccaaagagtggcgtggtggtaactcacaacacactcgtaacctccgttgcatgcatgatgctcctcaagatgtattagtcgatgcctaccctgaagaagaatattggcaagacctacttaaagtgactgcgggcaaaaccaatgagcacttagctcgtctagtgattcgtagcacggcgacctgtcgtgactggatgcgtaaacatggtgtgaattttcagccgccgctctcaggtgccttacatgttgcacgtaccaatgccttttttatggggggcggtaaagccctcattaatgcgtattaccgaagtgcccaagaacttggcatcgaaattttatacaacacaaaaattaaagacctaaagttaaaccaaggatattttgaagctgcaattgcggaagatggccgtgtatttaaagcgaaaagctgtgtattggccgcaggtggttttgagtcaaatttggaatggttaagagaagcatggggacaaaatgaaaacggcgaatggcctgccgataatttcattattcgtggtacccgttttaatcagggcaacttactcaaatttatgatagatcaaggcgccgatattattggtgacccatcacaatcacattgcgtcgccgtagatgcacgcgcaccgttatatgacggcggtatttgtactcgtattgactgcgtttccttggggattgtggtcaataacaaagctgaacgtttttacgatgaaggcgaagacttctggccaaaacgttatgcgatttggggccgtcttgttgccaaacagccacagcaaattgcctattcgattatcgactcaaaagccattggtcgctttatgccccctgtgtttgcgggtgtaaaagcaaatagcattcaagagttagccgaaaaaatcgggctggatgcaaaaaccttataccataccgtagaagaatttaatcaagcctgtgtgcaaggcacctttaaccataccgttttagatgactgcaccaccgaaaatattgttcccaacaaaactcattgggccgttcctctcgaccaaccacccttctatgcctatgcgcttaaacccggcattacctttacctatttaggcttaaaagtcgaagacgatgctgcggtacgttttaacaataaaccaagccgtaacctgtttgtcgcaggtgaaatgatggcaggtaatgtactcggtcagggttataccgcgggcgtgggtatgtcgattggcacgacctttggacgcattgccggaaaaaatgcagcccactatgcactttcacaaggagttgaacatgaatgctagtaccaaagccctaattccagttgttcagctctcagaccacgagcaagaagtccaaagagccctacagatttgtaatgcttgtcgttactgtgagtcattttgtgctgtatttgctgccatgaccaaacgtcttgagtttaaccaagccgatattcattacctcgcaaacctctgtcataactgtggtgcgtgtttacacgcttgccaatatgccccgccacatgagtttggtgtaaatattccaaaagcgatggcgcaagtacgtttagaaacttaccaagagtttgcgacccctcagcctttaggtcaactttataagtctgtaggtattccttttgtttcgacgttaacactcattttctttttttgcatgttagctgtagtgtggtggaaaggcactgacttatttgcaggctatcaaggtaatttttatgcgattttcccgcataactttttagcactactgtttggagcgacctttacagttgcaattgttttactcggcattggaattagcaaattttggcgccagacgtctaaagttattcatggcaaagttgagaaaccagacttagttcaagccacccaaaatgtattaacgcttaaatatttagatggtggacatggcaaaggctgtaatgagcaagatgaccgttacacacaaatccgccgtgtgttccatcacctgacgttttatggctttatgctctgctttgcagctacaggtgtagcgactttatatcactattttcttgacctacatgcgccttaccctatctttagcttgcctgtgattttgggtactttgggtggaattggcttagttgtcgggcctgctggcttactctatttaaatcttaaacgtcatccgttgcatggtgaccgtgagcaaaaacctgtagatcgaggctttattttccttctacttattgttagcgcttcagggctagtacttatggcatttcgtaataccccttacatggcacttttactgattttccatttagctacagtcatgacattctttattaccatgccatttggaaagttcgcacatggtttttaccgcagtgcttctttactcaaattcgccatcgaagagcgtatttcgaagaagtcataatgttcaggattagaaaaacttcctaataagaaaccgctataaaagcggttttttatattcaactacaatgataattgaatggccatattgaaaacggtaatagcttaagcaatcttcccatcaataatgcctttctcttttaacgtagccagctcctctgctgttttaaatctcgataagatttgagtagtatgttcacctagctccggcggtgcatgacgatattcaacgggagtatcagacagtttgattggtgagccaatggtttggaagttttcatttaaacgatgaggaatgttcaccaccaaattgcgatgcacaatttgtggttcagctaaagcatcttcaatagagttgataacacctacgggtacttttaaggcatgaatcatgtcgacccattctttagcagtttttcgcaaaaagtgttccgacaataaaggtatcagttcatttcgatattttacgcggtcttggttgcgcacaaacttttcattttcgagcaactctggataaccaatcgcaatacacaaatctttaaactgtttgtcgttgccacaagcaataataaattctttatctttagccttaaaagtttgatacggcacaatacttgggtgttgattacccatgcgttgtggcgctttacccgaagctaaataattcattccctgatttgccagtgccgcgacctgtacatcaaggagtgacatatcaatatactgaccacgccctgtgtgtgaacgtgcaatcaaggcagcttgaatggcaatggttgaatataaaccagtttgaatatctaccacagccactccaactttttgtgcaccaccacctgttacatcatcaggttcgccagtaatgctcattaagccagacataccctgaataataaaatcataaccgggttcttctgcacgtgggccatcttgcccaaaaccggtaatcgagcaataaacaatgttcgggttcaactcacttaatgacgcgtagtccaaaccatatttagccaaagaccctgtcttataattttcaatcacgacatctgcagtcttggcaatttcataaattaaggcctgaccttctggtgtggtaatgtccactgcaaccgaatatttattgcggttggtacactggaaataaccagattcacgggtcatgtttccatcttgatcgggcatccaaggtggcccccacatacgggtgtcatcaccgactcgaggacgttcaattttaatcacttccgcgccaaggtctgccaagatttgcccacaccaaggccctgcaagcacacgacttaaatctaaaacccgaattccttgtaatgcacccataacgatacccttatctttttagaaggtgctcaacgcacctccctgtcattgtttatgattgtctttgtggatcgtactgacgatctttaataaataagccaggcaatacacccgcaacaaaatacgcagcgcccatcacaataaaggccatggtaaacgtaccgcccgatgccaagaaaccaatgatagctggtgcaatagcggctccgacacgaccaatgttataggcaccgccaatggctgttccgcgcacgtcggttgaaaaactttcagccatataggtcgcgtttacaccatatggaatgccatataagaagccaaaagtgatcaataaatacaaaatattgtcaggagtattgaagaaaataatgattggcaaaaacacagcactggcaattgtgccaaatacaaaaacagcacggcggttaaacttgtctgcaagatagcccgctaaaatttttcctaaaatcattgcggtatatgaacccaccatataactggttaagtttttaaagttcatatgcacttctgtttctaaataacttggcatccagttgttaatgccgtaataaccaaactgtaagaagaatgctgtggtcatccacaacaaaaacattttacggtgcttaaagttattaaagatttgtttgtagatactgctactttttggcttttcagccaccactctttctttaggctgtctgttgccttgtaagctttcaattttggtgagctgccaagattttggctccggcacaaatcgttgcaggaaaatattaacgaaagcaggtactacggtcaggaagaataaaacgcgccagccataatctggaataattgcgccagctaataacgttgcagcaatataacctacagtctggcccgtctgtaacgtgcccaagaccgttgtacggtaagtggttggcacatattcagccattaaggtattacacgccatatagagtgctccgattcctaaagcacctataaaacgtagagccataaattgctcgaagctttgcgtaaagcctaacaaacaagtcgctacagaaaagaaagtcaccgagttggcaatggtccgtacgcgaccaaacttgtcacatgcccagccacccaaaataccgccaatccccatacctgctaaagaagcactgcctaaggcacccgcttgaaaggtagttaacccaaactctgcctttaaactggtcaagctataagacagcagcataatatcaatgccatcgaccaccatcgcaaaataggcaaataacaacgcccatttccatgtatgaggtccaatcctttcgtatgttccaaggttacttggaaatgtatttcttaattctttcgatattacttgaacgtcattgttcatctttagttcctcattttcccaaatgagtcatcggtagcttacttatgttttctgtatgacttaatcttctatattttcatcatcttacatttggttttaagtacacagagacacatcttcacatgagtatccttacgatgaatcttgtcattttccataaatttttgcgtaaaaatccctaaaggtgctcccgaaagaacacctctatttttaaaaatgagtgtgttagttactaaatgcggcaataccagtttgtgcacgacctaaaatcaaggcatgaacgtcatgtgtaccctcgtaggtatttacgacttcaagattgaccaaatggcgtgccacaccaaactcgtcactaatgccgtttccacccatcatgtcacgtgccatgcgggcaatatcaagcgcctttccacagttgttacgcttaattagagatgtaccctcaactgatgcaatgccttcatctttcatgcggccaaaacgtaaagctgcctgtaaacccaaagcaatttcagtttgcatatctgccagcttcttttgaatcaattgatttgcagccaacgggcgaccaaattgtttgcggtccatggtgtattgatgtgctgtatgccaacagaactcggcagcacccattgcaccccatgcaatgccataacgagcactgtttagacaggtaaatgggccttttaagcctcgaatttcagggaatgcattttcttcaggtacaaaaacgttatccatcacgatttcacccgtaatcgaggcacgtaaaccgaccttgccatgaatagctggcgcagataggccttcccagcccttttctaaaatgaagccgcgaatgtcacccacattaccttcagcagaaacttcttttgcccagaccacaaatacatctgcaattggactattggtaatccacatttttgcgccagtcaaacggtaaccaccatcaacttttttagcacgtgtaatcatactgcccggatctgaaccatgatcaggttcggtcaaaccaaaacaaccaatgtattcaccagtagccagtttaggtaagtacttctgcttttgctcttcggtaccaaattcatgaatcggaaccatcaccaatgagctttgcacgctcgccatagagcggtagcccgagtcgacatattcaatttcacgcgcaaccaaaccgtaactcacatagttcaaacctgcgccaccatattgctcaggaatggttggccccagtaagccaagctctcccatttcacggaaaatagatggatctgttgtttcatgacggaattgttcaagtacacggggttgcaaacgttcttgacaataggcatgagccgcatcacgaatcatgcgctcatctgggctaagctgttgctcaattaaaaatgggtcttgccagttaaattgaacttttgctttttttgttgtcaccatgtgattcatcgcatcctctgcttgatttgatcttctttatttaactcgatgttatgcgtgaaaaatgcagtaatcaaacgataaatgttcatgcagatatgcgacttacgcatatttaaaatgggtcgcattaaatttaactatttaattcgttgtatttcattaaaaatgacttatttttatactaaactcggatatctgcatttaggtcatatgttgttttgaaatatgatggcaaataaaaggatttatttatgcgaaaaagtatcccgtccattcagggtctaatttgctttgaaagtgcagcaaaacatctaagttatacctatgctgcgcaagagttatgtattacccaaagtgcagtttctcgccaaattcaacaattagaagatttcttaggcgttgaactctttatacgtactcggcatggtgtcgaactcaccattgctggtcagcagtattttaaaagtattaagccctacttattaggtttagagaaatgtacagccgatgtgatttctcataagggtttaggtggaacattaaagttaggtgtggttcctacctttgcaacgcgatggttattacccaaactccatcttttaaatcaaaaacaccctgaaattacggttcatttagaaaccagtactaaaccttttttatttaatgacaacatttttgatgctgcgatttttgcaggtacgcaacagcaaattgaccactggcccggcatacaagcacattatttaatggatgaagaaattgtacctgtgtgctcaccaagactaatcgaaaagtattttccagatgctgtgatgattaatgaaaatacctatgatttaagcccagaagatttattaaaaatccctctactacaacaaaccactcgacctagcatttggcaagaatggtttctaactcatcagatgcaacaccctaagccttttgatggacagcgccatgagttattttcgatgcttgccgttgctgccagtcatgacatgggaatggctttaattccacaaatgttgattgagtctgaactacaaaaaaaagaactagtaattgtttccaataaaaaactaaaaggcagccggaagtactatctcattcattcgagccaagacatctcaccgactattcaaaaatttgttgagtggatttaccaagaactagaacaactaaagaccaataccaattagctgagcagccctgatttatgccaaatattgcgatctataaccataaaaaagattgtgattaatcaaatcacaatctttttagttaagcgtaaatgactttgaaattaatgactcattaattgaatatctgaaccgctacgtttcgggtcaatcaagattttggcatgctgttcaggatcacgtaatgcttcaaatgcattagttacaccttctaggccaacaacacccgtaatgagcggtgaacagttcactttcccttctgcaatcatgtgtagcgcatctctaaactcaagcggtgtatagcccaacacaaactgaatttctaactctttattaattgcaagtgcgggttctattttatcactttgcatgcacacgcccaccccaacaattcgggaaaacaaaggtgcaccttcaataatttgctgcaaaacacccggtacgcctacacactcaaaaataacaggacgttttggtagagcgcctaatttgtcaatcatgcgccatccatgccaccacggtaagcgtgtcgcttgcaacttatcaaatagtcccatacccatgttaattgcatctgatacattgccaagcaaaccaaattctttccagttggcaaatggtgatgtctctttagggtctaccacaatatcggcaccacattgctcggcaagcttacgtcggtttggagaaaagtcactggcaactacggttttaaccccagcagctttaagcattaatatgacacctagcccgacaggaccacagccaatcacaatcgcaggttcacttgtttttacacggctacggcgaacagcatgcaatgcaaccgccataggttcggtcatggcagcactatccgcatctagaccattcggtacttcaaacatcaagcttgattgagccaatacttgctcggcatagccacccgaagcatttggggaaagccctgtagacaaataaccatgctgatctacatttaaaagcggcattgcgcaaacgagtgtatccgctttaaatttatggcgtgtttttggaccgtagtctaaaaccttgccgcaaaactcatgtccaagtacaaatgggtctgtagacttcgctaaaccattaaacccgacacgtgcagccaaatcatgcatgtggtcgcagtgatgctgcatatgtaaatctgaaccacagatcccacatcgcaccacttccaataaaacttgtccttttgcaggtgttaagttcggttggtccactacttgcaatgttgcttgatgacaaagtaccgacttcatttgagtgcttcctatttcttctttttcatttacttgccagaaatagatttctacagataaattaatcgctttatcggtttggtctttagcaagcctttattcatctttacaagtaaaaggcaaaataccaatgaccattcttcagccaatccactcttaaagagtcaacacaaaaaggctcagcgaaattaaaaacaataaaaatcttggtgcttgtatcttacacagactgtgttgtcttcttaggccagaacaatgtcatcaaaattaaaacttatacaaatatagtaatttcaaaaaactcaactcaaccattttcacaaaaacatagcaaatccaaacttttatcagtgcatctaaacaggcatgatgaattgatgcaaacagataagaagaaatttatgattactaaaacgctcccgcttacagatatacaccgccaccttgatggcaacatccgcattcaaaccattttagagttggggcaacaatacaatttagatttgcctgcttacgacatagaatctttacgaccacacgtacaagtgatggataaccaacccgacttattaagttttttatctaagctcgattggggcgtaaaagtattagccagtttagatgcctgtaaacgtattgcttttgaaaacatgcaggatgcagcacagcaaggactagactatgtagaactacgtttttcaccgggttatatgggaatgacccatcaacttccacttgaaggcgtagttgaagctgtgattgctggaataaaagaaggtagtcaggcgtacggcgtaaaagcgaatttaattggtattatgagtcgtacttttggtcaagaagcctgcgaaaaagaattaaatgccctccttgcccataaaaacgatattaaagcactggatcttgctggagatgagcttggttttccgggcaatttatttattgatcactttaaaaaagcacgtgatgcaggttggcacattaccgtacatgcaggcgaagctgctggcccagaaagtatttggcaagccattgaagaattaggtgcagaacggattggacatggtgttaaagcagttcaagatttaaaacttctagattatttggctaaacaccagattgggattgaatcttgtctcacctcaaatattcaaaccaacacagtgccttctttagcagagcatccattaaagacttttttagaacatggagtgcttgctaccattaatacggatgacccagcagtagaaggcattgagatacagcatgaatatttaactgctgccccattggcaggtttaagtcctgagcaaatttatacagctcaagaaaatggacttaaaatcgcatttttatcacatcaagaaaaagatgagttaagacagaaatatcaataacagagaacagagaacagagaacagagaacagagaacagagaacagagaacagagaacagagaacagagaacagagcttatataaataagttcagatattggagcaatttggaattaaaattttattatagaaaacaaaaaaattccttctatccataagataagaagaaatgattttaatatatgggatattttagaaagcttgaacgcttttaaatatggtcggagcagtaggattcgaacctacgaccccctggtcccaaaccaggtgcactaccaggctgtgctatgctccgaaattggggtgaatgacgggattcgaacccgcgacaactggaatcacaatccagggctctaccaactgagctacatccaccatcaaataagttctacgtaccaagctaccaaatggcgcgcctgacaggattcgaacctgtgaccatccgcttagaaggcggatgctctatccaactgagctacaggcgcttaaccgatgatgcttatcatgcgatacttcgccgatcttaaaatattcttttaagtggtcggagcagtaggattcgaacctacgaccccctggtcccaaaccaggtgcactaccaggctgtgctatgctccgatctatctcagcttttgctgtatcgcacatcgtgcggtacggtgtgcattctaggcgcgacgccctcagacgtcaacacctattgtcaaaaaaagttaaaaatccttatcaaatgtatatttaacaagcattttgaggctttttaacgttttaatgatgcactaaaggctaacattcgatctaaaggcattttggcacgttcagcaagtgctgggtcaacgtgtatttcttgatcacctttttgtaaaacttctaaaattccatcaagttcattcatggccatccatggacaatgtgcacatgaacgacaagttgcgccctcacccgctgttggggcttcaaccagaatcttatctggtactgcttgctgcattttgtagaaaatgccacggtccgttgccacgattaaacgttggtgtggcaaagtttgagcagctttaatcaattgagatgtactacctaccgcatcggcaatttctaccaccgactctggtgactcaggatgcaccaatacagccgcatctgggtacagtgctttcatgttagcaatgccacgtgcacggaattcttcatgcacaatacatgcgccatcccaaagcaacatatcagcgccggttttcttttgaatataacgacctaagtgctgatctggtgcccaaataattttttcacccaagctatctaggtgctcaacaatttcaactgcacagcttgaagtcaccacccaatccgcacgagctttaacagcagccgatgtattggcataaactactacagtgtggtcagggtgctgatcacaaaatgccgtgaactcatcgactggacaacctaagtcaagtgaacaggttgcctcaagtgtcggcatcagaattgttttttcaggagacagaatttttgctgtttcacccataaacttaacgccagccacaaccagtgtagaggctgcatgatctcgtccaaaacgggccatttctaaagagtcagaaacgcatccacctgttttttcggcaagttcttgtacatctggatcgcaatagtagtgagcaacaaggacagcatcacgttttttgagctctgcttcgatctgtgcaaacttttgttgttttgcttcttcacttaggcggttgtcttttggttcacctaaacggtctaaatgcgcttgtacaatgttttttgcatcgttggcaattaaagtcgcatcactcataaaacgtcttctctatccttcatgctggcatacctgctcgcatataacgttactgcttaaacgatttactaaattcaatcatttaatatcaaaagatggggctaataaaaaagcctctttgtcgaggcttgattataactgaatatttacgaacggtaatctgcattaatcttgacatagtcgtaagataagtcacacgtatataccgtgtctttggcttgtccgcggcctaagtcaacacgaatggtaatttcggtttgtgccattacacgagcacctgcttcttcggtatagtcctcggctgcgccaccatctttacagatttgcacgtcgtctaaccatacctgaattttagacacgtctaagtctttcactccagcatagccgattgcagctaaaatacgaccccagttcggatcagatgcaaaaagtgcagttttaacaagtggtgaatgcgcaatactataagcaatgtcacaacattcttgagtatttgcaccaccttcaacagcaacagtaataaacttggttgcaccttctccatcacggacaattaactgtgctaaacggttcattacacgagcaagtacttctaacactttagcgtagcgtacatcgctttccgatgtaatttcagcaccaccagcctgaccagttgccacaaaaatacaagagtcatttgttgaggtatcaccatcaatggtaatacggttaaatgaatgctcaactgtagtctttaatagcttttgtactaaatcacggcgaataggcgcatctgttgccacaaagctcagcatagttgccatgtttggacggatcatcccagcgcctttactaataccggtcatggtataagtcataccatcaagctcaaattgttcagatgcgccttttggcactgtgtctgttgtcataatgccagatgccgcatcactccatgcagcgtcttgtacgctatttaatgcaggttgtaagccagcgagtaaacgttccatcggaagctgctcaccaatcacgcctgttgaaaatggaagtacttcgaaactgttaacgccagcaagctccgctaactttgcacaagtatcctgagcatttttcaaacctgtaggaccagtaccagcattggcattacctgtattaatcactaaatagcgcggattgccttcggcaagatgagctttagatacatgaacaggtgccgcacagaatgcattttgcgtaaatacacctgcaacatttgaaccttctgcaaattcaaaaatgactagatctcgtcggtttgggtaacgtacatatgcttctgttgagccaatttttacaccttttaccacatgcatttgtggcattgttacgtcaccgacagccatttttaaaacatccagagtttgttatgaaaagattaatatttcagaaaatagcgaggttataaaacacgctttatatgaaatatcagaattgacagcttattagaaaagcctgaaaaaatcgagcgctaaaaatagcttatttttgctctaatcttaataaaatatctttcttatcaagaccaccggcaaaaccaaccaaagctccgcccgcaccaattactcggtgacaaggtgcaataattgaaatcggatttttgccatttgcagcacccactgctcgcactgctttttcatttccgatctgaacggcaatatctttataacttcttgtttcaccatacggaatcgtaagtaatgccgtccagacctgcttttgaaatgcagttccttcgaaatctagtggcaatgtaaattcacggcgtttgccttcaaaatattcttgtaattgttgttcggtctttaataaaactggatgctcaagttgttcgaccagctctgccagtcgaacacgttttggattttcattgtcccaaagtactgccaccaaagcattttcattcgcaaccagctttaattgcccaacaggcgaattgatatacttataagacagcaacatacttgatcctcttaggatggagacgaaattttcattagaaccagtccagatacaatcagtacagcggcaatcattctcatcgcaccaataggctcatgaagaaagaaaataccaactaaaaatgatccaattgcaccaatgcctgtccaaaccgtataagcagtaccaaggggtaaagttttcattgaaattgaaagtagaactacactcaaaatcataaaaactacggtaataatactaggtgttaagcgtgtaaaaccttcagacattttcatagaatatgcccaaatcacttcaaatacacctgctaaaattaaaatagcccaagccataacattcactaatttttatagtgtcaggtcgtcccgacatgattacccattatgggggaggtcgttcctcctttatgtgaggactcagtttactttaaaataaaaaatgaaggcaaacccgaactcaagcttgcctctatcagaaaatattattcattttttaactgtaaaatttttcgtgcaccatttaaaacgaacaaaacaataatcaatccaataattaaatcaggataacgagagcctgtgattgcaaccagtattcccgcaataatgacacctaagtttacgatgacatcatttgcagaaaatatataactcgccttcatatgtgccccgctctctttatggtcactcattaagtaaagacaactaatgttggccgcaagcgctaatcccccaattaaaatcattaaaattgaaactggttcactgccatatataaaacggcgcagcacatcaattaaaacgattatggctaaaccaaactgcaaccaacccgaaagatgtgcagcctttaattgagcgtcgaggtttttacccaccacgaataatgcaataccataaattgcagcatcggcaaacatatcgagcgagtcagcaattaaccctgtggaggaggcaatgatgcctgccattaactcaatgacaaacatgaccccattaatcagtaacagccattgtagtacctgtttttgtgctgcattagttgaggaacttggtcgaacctttttgggtttttcaataggctcataatgtggttgggtttgttgtaattcggctcctaaacctagacgttgcaggcactgcgtaatcttttcatcttgagtactgtgatacaccgctaagtggcgggcgggcaaatcaaaataaagttcttgaatatgctcagcataagaagctaaagccattcttaccatttgttcttcggctgcacaatccatacggggaatatgataataactcacccattgggttttatttaccctaggttcacttgccacagaaaagtcctgagctgctacatttgagcacccacagctagaacagcttttatttacatttatttgattctcttgtttttctaaagccatctttgcaccataactgacacaaaaaacaatgccatcagtataaaccaatggcatgtcattaagcttactttttgttcggcaattagaattttagtgttaacccagctccataataccaaccatgttctgagtcggttccagtttgccaagcggtttgttttaaacctttttcataaccataaccgacatcaacaaatggcatgacctttttattgatttcataacgggtttgaaagccagcttgtaaactcgacaggcctgttttactggcatagcgagattcatcttgtaaaacaacatctgcttttaaatagggcttaccaatcaacttttgagtaaaaagcaaatctctttctgtctctaggcttaacttccataacttatcttcacctacataaagataagcatcggtttcaaaaaagtaaggcgccatgccatgtaagcccactacaccagcccagcgatcttccttttcgtcttcccgttgtaaacgttcatagtttaccccggcctgtacatcccaatagtcagctacattgcggctataaagtaatgaaccgccataattggcatcttctgactctgctttttcaacgtgggctttaatgaacaatttattttcatccgttcccacccagctttccaattcagaagaaaaactgctttcaccctcttcattttgagtccagccagtatcaatctttgttgcttgataaacctgtccaccatgttcgcgtaaatgatcgtgtgttaaaggttcttgagcaaaagcaaatacagatatacccgagaaagcaccgcaacatatcatttgagaaaataacttagtgatgcgcatgactagctcctttctcattttcagattgaacagttggctgggactgagcgggttgttgtccatcgttgacttgagcaacaattaatttattcatcattccagcactcatgtgatagagcagatggcaatgaatcgcccattctcccaaagcatcggctgtcaataacgccgtaacggtctttccgggtggaacaataatagtatgtttatttggtaaattttcagcttgttgaccattttccaattgcataaacatgccatgtaaatgcattggatgagccatcatactgtcattcacaaacttcaagcgtatgcgttcaccatacttaacttgtaaaggtatcgtgtcactaaatttcttgccattaatggtccagatataacgctccatgttgccacctaaacgaatgactaattctcgttcgggcgcacgggtatctggctgaggtgttaaagattgcaaatcgctatattgcagtgctttcatacccgctggcgttgaagcatttgcccagccataaactggttcatcctttttagacttattctcagattgagcaggcatctcatgattcatattcatcatagtgtggtcatgctcgctagatgacattgcctgcatatcatgcttcatttcagacatcgctgacatatcatgcttcatgtgcatcatggaatgatcatgttcgccagatgacatatttttcatgtcatgatccattttcatcactgtgtgatcatgattagcctgactcgtctcttttttcatttcaggcatggccgacatgtcatgttgcatgttcatttgatggccagcatgttcattacttccatcaccatgactcatgcccatatcatccatggtcaataaagcacgtgggcgtggtattggcatttggactggccccacagcctgcgtattttcattgtgcaaagtaccgatagcaaaaccactacggtcaatagactctgcttcaatctgataatttggctgtttaggttccacaatgacatcgtaggtttcagctgtaccaatacgaaactcatcaattgctacaggtttaactggctgcccatctgcacttacaactgtcattttcaaatttggaattctgacatcaaaaaatgacattgctgatgcattaataaatcgcaatcgaaccttatcaccagctttaaaattagctgtccagttttgctgaggagtcttgccgttgactaagaaggtatagcccgtcacatcagacatatcggtttttaacatccgcatctgattccacatcgaacgatcttgccaagttgcttttaagccctgtgctttaacttgcttccatacatcagatacagtttcacggcggttttgataatactcagcagattttttcaaattcttcataatgctatcgctagaagaatcatggaaatctgaaagcatcactacataatcacgatcagttttttcatgcgccgcaactggtattttgccttttgggtaaatcacaagcggcccatataaaccgtcttgctcttggcctttactatgggcgtgataccaatatgtgccattttgtttcaccttaaagcggtaaacaaaatctccatttggagcaatccctttaaaattattaaaacccggcacaccatccattaaccctggcagtaacaacccatgccagtgtaaagaggtatcttgattctttaattgattatggacgcgaataacagcctcatccccctcttcaaactcaaggagtggtgctgtaaattttccatttacggtaattcgtttaaggggtttgcccgtaacattgacttgttgttcattaatattaaggtgatattccttaattgccgcgagagtccatggtgaaaccaatagaccaaatacagcgacgaggctgctaatcgttttatgagacattgctttaatccttttaactaaaaaaataagtaagaaaggattaagcttttggtggacgtaagatttcttgccagtatccggctaaatgctgtgcctgataaatactactaaattgagatggaataggaataaatgatgattcaatatctggtatagcttgctgtaaagccagatttaccatctgacaatggaccgggttacagtcttggcagtgtttaccatgttggtgagaaacctgactcatagattgatgacacgttgcctgctcatcagcttgaatatgcatagagtgatgtttcatttgctcactatgacacggcatagtatgaagatcatgctgcataggtgtctgagcaatagacacaccactccacccaataactaaagtcatcaggaacacaaaccaagcatacttgcgtaagtgttgcagtgtcatcatttattgccttgagcaatctatttatcttagttgtattagcataaccaagtttttaaacagatacaattttccatcttagttgattgttgttaaggtcattaagcaaatggaggctgatgctgaagaactaagtcaatcacctgtaatgcaccttcttgctcattatttgcagttgtgtaaggagcaacggcttttaaggcttcaactgcattttcgactgcaaacccataacctgctgctttaatcatctggatatcattattgttatcaccaatcgcaacgacttgatcgggttgaacctgccatttttgcaataatagcttcaaaccatgtgctttgtgctggtccggaagaatcaaatcgataaaattaaagccacttgagactggtaccaaaaccttatcttttacaaaactttgcttctgaaaatgctcaaaaattgtaaaactttcattttcctgcgcagtaaaagtaattttacacaccaagtcatctagtgcataaaagtcatctataaccgtcagcttttcaaaatagcgagcgactttagcataatcttccgcgttcatactgctatgcacataagcactctgttttccgcagatcaccattttagaggtatacactgggtcaatcgcatttaaaatctcaacgaattgctctttgcttaaatgagcaaaagctaactcttgccccgcatctacaacatgagcaccattttcggcaataaaagcaatctcatgattaatttctggaaaatacgtaacaagctttgcaagctgattaccactagcgactacaaaacggatattattttgttttagttgttcatactgttttaaaaaacgtgctttgttgtactgcttcttagaattaagaaaagtcccatccatatctaccgctaaaatttttactgtcattaatgatctaggtctcttactaaaatcttattaaatcaaatttagctttatttttcatgacacttttacagttttctattcaatatattttaaaaagttttacacaagccctctcgttttttgcacaggttattttttagcaaagcttaataaaaaaacagatcccaaaatatcccgatagaatagaaaaagaacgccaaagcgttcttttttcatacattttgcttagagaataaacggttgatctcattttgtttattttaccaacatcttatccatatggttatcaacacagttatccatacagttataaacaaagttatccacaagtttactctcagcctaatattctttttttaagcgtctacactaccgacttttgcaagctctgcacgcatttgatcaatcacaactttataatctggttgaccaaaaattgccgagccagcaacgaacatatcagcaccagcttctgcaatttcacggatatttgcaggaccaactccaccgtctacttctaaacggatatcacggccacttgcatcaataattttacgcgcttcacgtaatttttctaaagtcattggaatgaacttttggccaccaaaacctgggtttacactcattaataaaatttggtcaactttatcaagaacatagtctagataatgcaatggtgttgctgggttaaaaactaatcctgctttagcaccaccagacttaataagctgtaatgaacggtcaatgtgatgagaagcttctgggtgaaacgtaatgatatctgcgcctgcttctaggaaatcaccaataatacggtcaactggagataccattaaatgcacatcaacaggagcagtaattccataattttttaaagccttacacacacctgcaccaaaagttaaatttggaacatagtgattatccatcacatcaaaatgcactacatcggcaccagcagctaacactttgtctacatcttcgcctaaacgagcaaaatcggcagataaaatagaaggagcaatcaaataaggcttggacataggtggatgacctggctaaaaatttaaggagaggctaaaaattataacaaaaaagaacctacttggcccgctcttccttgcttaaatgacaacatttcaaacttgcaacgtaacgttgctactatagaatgccaagtgccaaacgaatttgttaaggtacattaaaccaatgtgaggattgataatgaaaagcacaactcatctattaacaaatgatggaaaacgcattgcaaaacgtctagttaatcattggaaacataagtttgaagtacaagaaactgaacaagattttaaaatcttaatgcctaccgcaaccattacgcttgcaccagaaacagagcagttaaatgttgctattgatagtcagttagatgaccacaaccacttagaaaaagttgttcttgatcatctaaaccgcatggctcaacaagaatttcaagttgaatggcaacactaaattaattaaccagataccttttctaactggattgcatggaactgcaaatgctcatccataaaagtctggataaaataatagccatgatcatagccagcatgttgtcttaaagttaaaggctgtcctgcctttaaacatgcttgcttaaatttttcagggtgaagttgttcataaaattggtcatctaacccctgatccaccaaaatttcattaaataccgcaccattttttgagactaaagccgtggcatcatgagccaaccagctctcacgatctgtacctaaataatggctaaatgctttttcaccccatgcacattcagttggcgcgcaaatcggtgcaaatgcagacactgacttaaacttctcaggatatttaaaagctaaagttaaggcgccatgtccccccatcgaatgtccaaaaataccgacttgttgagcattgactggaaaactttttaaaataagtggatataactcatcgattaaatagctttccatctgataatgctcagaccaaggcgcttgcgtcgcattaatataaaagcctgcgccttgacctaaatcccaattgtcacctactgcaacttgttcaccacgaggtgaagtatcaggtgtaatcagtataagactaagctgggcagccatatgctgtgcatgtgccttaatggcaaaagtttcttcagtacatgttaaacccgctaagtaaaacaaagttgagcaaggtttgccttctaaagcagcaggtgacaaatacaccccaaacttagtagagccttttaataattgagaatcaaactgataaatgcgctgctcaccttcaaagcagcggtttttttgcaggagttgcatcgtttttagcctctgtttgtgtctgagcaatatttacactacctgtatttggttgaggaaaaagatatttttccaactgaggtagcataagttccatattcttaccaatcatccattgtggctctgaaggttctacaccttgagctacttcccatttggttacggtttgcttagcagcattaaacgaatctttcatagaagactgctctcgcatcgccaaatcaaagaaagctcgtccaaaataagtataatcagcttcgttattacaaccgaacgaagttttatccgcagcagatgccgtaataattaaagtatcaggtgactgtaacgccggaataaaacttcctgagtaacaagcagaaatgacaatcacacgccaacgtatccccgctttatcgagcgtttcacgtaaccatttcggatcgacttgccccaaatctagaggtgcattttcaatttcaaaatggttttgttcaccgtgcgatgtcatatataaaaataacacatcactatcacggttcatttgctggcccatacggcgtaaggccaactctatactggttttagatgcaatcgggatttcagttcgggtatccggattattgaccagcatcattgaacgcccgactgtaccaaaacgcgtatcaaattgttctttaatacgaaccacttccgatttaaaaacgtcttgataactatcgcctgcaacacccaagaaataccaatgacttttagctaactcaccatattgaacttgctctaaagcatcatgaagtaatttactttgtgcataaaaagcatcttcggcaaaagtaggtggagaatcttccactttccaaataggctgatcttttactgaaagttgccaaaccaccatggtcgcaatggtcgcaaccataaccaatgcccgctcccaccaaggccacttaagctcacgtgagaacacccaaatgaccgccaaactttgccacacaaaaagtgctacaaacaaaccaggtaaaataccgttataaatagcatccggaataaagtttagataaccattagatcccaaatattgaattaaacactgtattaataaaatattggtatctaaaaccaaccacaataaggctggaaccaacattaaacgcggctgattaatacgctgtgataagaaaataccaacaataagcgcaataaaaggccaaagtgcgtatcctattagaccttgtgagttgaagtcgccaatttgaccggcaacaagccaactataaagtgagttggtacacccacctaatactccccaaacaatgagctgaagaatagagggatgtacgatctgtaaggaacgtcttgaccccaaaaataaccacattccggcaagctggttacttttaaaatcatgccaaaagttaatggaaggtttgagatcaatcataaaaaggtttcaaaaatttcgtttttgtcaggcaccataagtgtatgcctgctaagaattttagcaatcatgcttttgaactatatcacatatatttgtacattattcaagcaataaaacttaaccttacataagcttactgaaagtaagcatcaaaacgacaagcatccccctgccactgatgggctggttcttgatttgctaaaaaaatagcatgtcgtggacgttttacaatcactcgctttgcaacttttttggctagctcaagcaaatgatcacccaaatccatttctccatcttcgggtaaaagtaaatgcaaaagctgcatctgctttttgacttgggcttgttttttaattgcttgttgattttgatcgcgctgtgggaacatcgggtcaaggtagaccacatcaactgtttttgcttcttgatctaattgctgtaaatagcttgcagagtcggcgaagagcagttgaatacgatccataaattgacttaaaaatggatcacgctgtgcctgagcttttgaatcctcaagtaaagtaaataaaatcggatgacgctcaacgagctggatttgggcacctagataagccataagtaagctgtcatgacctaagcccgctgtagcatcgactagtactggcttttcacctaactgacaagcacgagcaatcatttccgatttaagacttgctcgttttaaacgcggaatttcagctttccagtcaggctgcattttcatgccattagcagataaccaaagtccgttttcatctacacaaagagccaagtcaggatttaaacgtaaaaaacgggcattaagtttttcaataggctgtaaatcgacagtcacgcctctagaataaagcacagcttggtagtgctgtgcttgttcttgaaaatctacttcaaaatatatgtgcatgcgcagtgcctttaatttgttttgccctgatccgcaatttttttccatgcatcatcacgtaagtaaaccggtaaagcatgttcagcatcaacccactgcttttgcgctgcatacacacgtgcaatcgaagcaatgtcttgtgcagtggcagtgattgtttgatattctgcatcagtttgaagaagcttagcacccgaaccgattaagcaatgctttgcataggcagccgcttgctcgtagttcattaatttttcttcatctatacactgcatgatgcctcgctcatctagaacaaaacttgcaatgtaaacttcattcatacgtgcatcgagtaccgcagtcacctgttctaaaccttcaagtcggtaagctgcttgtgcgagagcttgtaaggtagaaacgggaaccacaggtaaatcttgtgaccaagctaaagcctgagcaacagcagcattaattcgaacaccactaaaagaaccgggccctcgactaaaggcaattgcatctaaaccagctacgtcaagtccggtttgctgtaacccttgctcaatcattggcaaaatggtctgggtttgtgctttcgctcgcgtatcgagttggaaaaagagttcttgggtttcatcgattaatgaaatggaacattgctcgtttgcagtttccaacgccagcagtttcatgcacaaccttagtattcaatcagattaaaaacggaagttatgataccccactcggctctgataggcgagttgttcctatctaaataaaaatgccaagctggtgcttggcatagaaaatatctcgctaaaattttaaaagtggaattctttcaaatcggtatagcttttaaagtgttcagcataatgtagtgcgctcaagcgtatttttgctgcgccttcttcatctaaagtttttacaatttttccaggtgagcccattaccactgagttatctggaatcactttaccttccggtattaaagcattagcaccaataatacagttcttaccaatcacagctcgatttaaaatgacggcgttcataccaatcaaactgttatcgccaattgtacaaccatgcaacatgactttatgaccaacggtgacatattcgccaatatttagctcaaggcccgcatcagtatgtaataccgaattttcttgaatattagaaaaattaccaatccgaacgacacaattatcggcacgtactacagcaccaaaccaaatactgacctgacggcctagttctacttgtccaataagcgttgcggttggagcaacccagccatcccatggctcatgtaaggcttttggatgctgcccttgatagctatacatcataatttatcagtcctgatctttattttttatgagaaaattttggcattccaaacgttggtgcattcagtagaaatggccattctttttggtagcctaaaccatatttaaataaggcaattaacattcgcgctgtgagcccccaaataatttcattatcaatctgcaagcttgggaagtataaagattgatgagcatatcgcacttcatatggcgtcggacgcgtctctataagttgctgtaaaggcacaaagaaaattcgatcaatttcggtgggctgaggaattaaagttacctcaggaggaataagcccaacaatcggttttacagacaagccacttcttgcacgttgcatcggcaaatcgcctaacaactgcacatcaaacggatttaaagccgtctcttcttgggcttctcttagcgctacaacaatattactagtatcactagggtcacgcttgccaccaggaaaagaaacttcccccgcatggttgttcatatgtattgaacggcgtgtaagcagtaccttaggattattttcattcgtaatcgcaataagtaccgcagcttgtgcttcttgtatgcgggtggaaaagcgcaatctttgctgtaacttttgtgttagcaagtgctcttccataccattcacctattattctgtctctctttgcatcatatctgaaaatcaaacttagggaatagagttgatgcgtaagtctaaaaattcagttatgctgaggcatctctatactcgatgataattatgagtttctgtgtagcgtgtgggcataaaaccgaacaaaaaattcctttaggtgatcataaagtacgccgtgtttgtactcattgtggaaatattcactatgaaaaccccaaagtaatctgcggtgccttagcgttatgggaagacaaagtactactttgtcgtcgcgcgattgaacctcgttatggcttatggactttgcctgcgggttatatggaattattcgaaactatggaacaaggtgcggcgcgtgaaactcgtgaagaggcagaagccgagattgaaatagaacaactttattgcatgtacaatattccccgtattgggcaaatttatgtgttgttcaaagcacagctgaaagatggcattttcggtgctggagaagaaagtatcgaatgtcgactgtttgaagaacatgaaatcccatggggtgaacttgcctttcctagtgttgaacacacattaagacattattttgaagaccgtaaacaacaagtttttccaacacatctagagacgttaggaactcgtttagaccatacaggctaatcaattaaataataaaaaagaccgcttttgcggtcttttttatttgttgaatatgttaagacttagttttaattgctttacaagctggaatagattgatcggcaagtttaattgttactgtaccaaatttacgttgagccaaagctttatccgcagcggttggagcaggcacatccttaagcatattatagctttcttgagctgccgcatgttgattaaaccaagccgtattattatcaaaattaatgcttgtactatccaccttatttgccaataaattaaatagattcaatttcgcaggccccggagaaacgcctacaaaagttaccccaaccatcacaccatcaatatttgcaaattttggattagataaaatcatacgaacataaacagattgatcaccatttaaaggatcattaaatgtcgctgctgtggtaccaattcgatattgttgcataccattgttatcaattaaacttgcatctgataccgtagcacattgaccagacatatccgttgttgtcgaattaggtttgatatcagtacgaatatcaccatgctcatcaatcacaatacctaaatttacaggttggatagtggtatctgagaaattaaatgttaaagtagcgtaaagagggaaaatatatttttctcctgtctttacattccctgatgttttaaaaacatttctctctagataactaataggattacttttaataatactcaataccccattgtagttatcaccatcaacattttggcgccagagaccatagtgttgtggattacctgtacttagcttcgtcaaatacttatagaatgcttctgtacccgccactccataatcattaaagaattttccttgataaatctgtagatcttcgtttggattatttgaaaaactcaaacggagtggtgtagttgactgaatttctcgactaacaggatttaaccaattattttgtgcatttacattgagtttagctggtttaacttttgtagttaacaaatacggattttgtactttgttatctattacaatggcacttcccttccactgtaaaccatagcccaacgtataaccttgacggtccgataataaataaagatcatctgttgaatgacgtaagttaattgtattattcaagcattcttcctgagtacttctattgcaaccattaaacacttgataattttgaaggattgttgagttaataaataaattgaatgattggaaaacaccagcattacttaaattagtcgtttgtactaaaagtttatatgcatcatcatcagaaatttgatttacatctaaccacggtttcaaaatacttgcataagctccgttttggaactctgtagcagttacgctctgagaaattttagtaagttgatctttctttatatctgtaagttgagtgggttgtatatcaccgatgagattatcaccattttctacaccaatgctttggaagatttttattaaagcaatcgccactttaattgtttcatcatttttatctaatgttgttggtgctttacctgtaataccacttgctaaatccaacactcttaaatatatcggattgatctctttagacttaccattaacggcagtaaatttcccaatcgtatcaagattaacatttcctaaaaaaacctttttattatctttactttgaatataaaaacgtgctgtatcaccaaccttacaggatcctattacagcatttcctgaaattttagtcgcataatgaaaatttgtggcagaactacaatcaaaattgatacccgctattggataatctaaagcaaattgcaaacaagttgaatcttctgcaccattatcactagtagttggtgtacaactgccagaagttaagtttccgttattagtaccagaatttggatcttcattaattgtcgaacttcctccaccacaaccatttaacatcaatgcaattgtggtaagagcaaaaggccataaaatttttttattcatttagctaccctacttatttttaacgtaataccgaaatttgaatttgtccctgatttgttaactctttttctgtaacatccacggcagaagataaaggcgtcatcataatataatgtgctgaaggcggtacttttaaaactccttgaatcgatgcatgctgtaacatagtcgaaggataagatttgcttttaaacccgctcactccttccaaaatacagcctttatcatccaaaaatacaacgagtggccaataatatagaggcttctcattactagaagcaaaagatataacttttaaatgctgaacagaaggatttaactgtaccaactcatattcaaacttttctttcaatggcttccgtggccataagtttacttccttatttatgctaagcgttttaattgattttttataatctttaataaagcacttatcttgttcaaaagctgcttctagctcttgtgaagacaaacgcatatacgttggtgctaaaacaacagtagagtcttggtcttgagtttgtcgattgaaaagctgatctaaagttgatcgacttacaccctttttccgctctactgattcagtgcgccccaaaccatcaggcataaggtaaaaccgctttttaccttcaaggttaaattcttgatcttcaagatattcattatttacatactctacgccatcaatagttgtaaatttagatttatcgagtgaagaatcggaggatggtgcagcttgagatgtactctttattggtggaggaacgagaactaactttttttgccattcattattagatactgaaggggcatttccgctctcaataattttatttttttctggggatgtttttaaatcatcactgactactgaaacagtttttgtatttttctgagttttttgcggtgcagtcggtgcagtcggtgcagtcggtgcagtcggtgcagtcggtgcagtcggtgcagtcggtgcagtcggtgcagtcggtgcagtcggtgcagtcggtgcagtcggtgcagtcggtgcagtcggtgcagtatttaatttttcttggacatgttgttccagttttttcggtgaatttttaatttgttctttttctttagatgttttttgtacagaatctactattagtggattctgctgagtttgtggttttctttcctctattttagggataggttgttttttctgatcaattcttttactcggtacaatcataggccgcccatctggcccaataattgtataaaaaccgtctgcataagatacagaaatactggctatcgcaacgcataaagttgtgatagcgactttaggtcgaaatatccctttatattgttttaccattttgttctatagctcaaaccaagtactgtaacttttgtattcgtttttacatctaagccagaataagggtttaataaaatattatcgacaccacatttattcgataaagtactcgtacaagctgggatgttgtcacgactacgaaggaaccctactgaaagatctagatctgtatctgcatcaaaacgataacctacaccaagaccaaataattgtgcgttattaattggaaccatggtattgcgtttgtcattaggtattgaactggcacgaggctcataaccagctcgtaatttcaaacgatcagttgctgaatattcaaggccaatcccccaactccacggcgatgtaaattttaatggtaatgctaaagaattatcagtaacgtcattagataaaagtttagcaacttttaataaggtgatttggcggtcaaactcaaatttaaatttattccatgccgaataatcagtccatccaacatctaaatttaattgtaaatctggcaatattttatatttaatacccgcttgaaaatgtgctgggtattcaagatccattgcaaccaaaccggactcaatatcaggaacataaccgggtaagccaagaatagcagctaaaatttggcctgttgcagaagaattcaggccacgtactagctcttgaggtgctttggcattatcaatcatatatttaccttttagacgcatcttggctgcactttgatataccataccaaaaccaaaatcgtctgttggttcccatagcaatcccaagttatagcttggacttaatgattgttctaaagaaacttgtaaggcacccattttattaaatgggttcattccttctttagcattacaaattcctaataacaacaaatcagtaatcatatcgttattatctttgaagggtgcgcacaccacatcatcgaccatacgtaaaacaccaatcatttcattaggaaaacgtagatcagttttcagtgcgattgcgttataggacatccctacggaagcaccaatagataaatgatcatttacctgataaccaaaagatggcgataaataagtgatccgctcaactgcaacttgctgtcccatgtagttgcctggattaccattttcagctccgaaacctgcgactaatggtgcatacatagctgtagcataggtgacttttgatcctggtggcttataggcaattccggctgtaggggcaactagtggataacccgccccaagatcaaccatctttttaagaattggtacatataaacttgcatattcaacatcaccatgtactgatcctttaaaatctgtacaaatattagctgaaacctcaggaccatcattacaaacaagtgggtcatcggaataaccaaaaatgttataaccaggtggagcggagaactcacgttgaatatcgaagttagcaagaatcccctgcacatctgtttgcagcccatcaatttttgctaaagctgcagggttaaaatggactgcactaatacctggagggtctgcagttacagcattccccatcgatagtgagcggatatcaacagctaagttttgtcctaattgagcattggcaaagctagaaaaaccggagataacaattgccgccgttaaaggacataatttaggatatttcacctgcatatctccttatttttgttttttattaaaacctaaaatatctaacgggaatgacaaaccaagtgaaatatctggcgcatcttcggttaaaccaataccaacggtaccgttaacaatcgtttcaggtgaaacccgaacacctaaagcaaaagacaacatcgcactactttgatcaggtgatttatagctttctccattttcaaactggaattcggcatccatattgaaactttgctgatatgacatggttaaagacacatcatagttaaatgagtaagcgaaaccaaaagaaaagccaccgctaatccctggatcaaatgaagttaatgtacgcgaacctcgggcttgattaaggccactttctttaaagccgtaattggcagaagcagaagcaaagagaacgactggatcaatatatttacgggtacttgcacccacaccaactgagtaataacctttacccgttgacaattcatctaaaccaatctcataaggactatcgccagtcttcgttgacaggctaccaaaaagaaccaaaggtaaacgaccttgttttaaaggaaacggctcccaacgtgcaccaaatgaaatatctcccaatcctgcagttgttgtatcacgaataatttcagactttgctacaaaaggaagagttgcggataaagttaagttatctaataccccatattgcaaagtaaaactatttgttaatgtatggtttgcatcttcctcaacacgtaaacggttgagctgagaggaattatccgataaggctaaatcaatacgagtatcacgataataagtgtagtcaagatcataataagaagaaattacacccttcttaatcaaagaatattggcgctcatttgaagtaaatacctcttgtaaatttgtctcctggctagcatcaccttcttttttctgtagtgcacttgctgcttgatgtgcctcactattagatgctggaactacattattagtttcagagacattagatgtttgtgtagtactatctgttgtagcctcactagaactagcagtatctgaagcaccagagttttcatttgcttctacagactgattagaatcggatacttgcgttgattgcacttgatcttcggcataaattgtccctgtaatggcactcatacttaaagccaacacactcatctttatccatcgattattcatgtttttcccacccaatttatttattttactaactttaaatttgactatttacgcttgtaataaagccgcatataggtttctatcggctgtccataagtcgcagaatgattatcgttatccaagacacgcctcatagttgatgctttgtttgctaaacggtcataattaaacgctggatattgcacatcaacaaaagcatatctattaaccgttgcatcttccacatggcgcatatctgcatcttttaacgccaataaatctttacgctgtgatgcaggaacagaaataacaaataaagtattattatcccaaatttctttaaaacgcccctcatcaaaactgatattccctaaagcagggtcagctacgtatactcttccatctttataagctttatatacgacaaaatgtttaaaaccagcatatgaaataggcacaattgctggctaccccagtttgactaaatcagaaaactcacctcgataaccaccgctttctaaaccaattgctgtgacaaagcgtttcatatcaagtaatgagaaacttcgtcgctcaataatacgttgatattcgccatactgcagcaaaccactcattgtttgctgttcagttaaacttgttccaacatagccgtttaataaagtcgtaagcgcagcagatccacaactataatcgtaggcttgccgaacaataccacgaaactggtcttcaacagctggttttatagtaactggttcaatatgatttcgatgaaatgataaattacgcgaatcggcagtctctgtataataaacagttcccggcggctttttttctatttcaaaggcttctgtcgcaaagtaatacatcaatgctgagcctaaaactatctctaacataagcacttggtctaaatggtggcctaaccggccttattcattttattcttagagcaatagctctacatccctgtgtgttgaagataccttttttttctgtaaaaaacagcttttttttaatctttttgatgaatgcatagttttacatttataaactgataattaattctcgttttcaaatgttttatattctttcctattatataagctaatattatttaaacagaaaagcatagatattagttttattaaaataaataaaaaaagcgcgtataaacgcgctttttacaaatctttaaattaatgaccagagatagtaattgtagatttacccacatttaaaccttgaatttccaaatcaccaattgaagcattacccgctgcacctaggtgtacgccttgtgcataaacattcataccttgcgtactgttattttggatacgtaaacctgtaggaactacagaaatatctgcatttacatccaagtcaccagttgtattaccagcaccacgaaccattactttgtctaggacaattttaccgccacctgcagcatcattaataccgaagttagatagtgttaaaccaccttgcaaactagagttcactttaatcatcgcgccttgcggagttgaacctaactgaacatttgcagaaatttggcccaaagataaatctaagccagaaataatttcagttggagctgtttcagtaataccacgtacagcggttgtttgatttaacgtaccagaagtacctacaccaattgaacctacatgtacatcaaccgcacctactgttgcagcaacgtttaagaaagcgccatttgaaccagaagcaccatttgtgtcaattgctaaatctaaaagattacctgtacctttttgagttacagtgacaccactaattgcgattgcaccagcagtacctgaagcacccgtaataccagttgatgttgctaaaccatcattatcgtgtagatatagtttatcgatagtaataccgcctgaacctagagcgataccaatattaataccatcttgacctgtagcagcactgagcgcagcatcatccattgattgcattgccattgcatttgcactgatagctaaagaagaaactaaagcaagtttagtgaacattttcattgagcactctcccaagagcatttattttttgactttaaccactcttactgtctcaagttgcatttttcttttatggcaaccgaaacttccaatccttgagtagttttgcttagcaattactaaattacagctacgttaatttttgttcaactagtgtaatgcattttttgccaattacccgacaaacggtacggcgtcaaactgactaaaaagatttattactattctgaaatctgaaggataattcgattattttttccacgaaatgttagggtcttttcactcaactgcctgttgaactctaacttgtagtaaactatgccacctcttccaaactctcacatgtttaaaatgtctcatttaaagaaaaaaatctctttagaaagctattactccgctgctgatattttaaaaaaattagaagagttaactggacttgtatatcttcaagatgataacaatcctgttattggttttttgccaaaaaattatttaatcactcaaaataaccaaaactttttattcactaaaactgatttaaataaatataagttttcatcttatatagaaaatcttttagattttacacaattccaatctcaagaactaaaaaatagcaatagagaaaaaataagttttaagggcggatatattggttttattagttatgacttttctgcacatcaatttataaataatcaatcacataaacaaccgtctttatttataggttcctattattcttttattaaaaaaataaataatgaatggtatttttttagcgatgaaaataatgcttttgaaatttttaactatctttcagatctcctcaataaacctgctaataaactacaaaaaaataattttaaactagaacaaaatattcatcctcgctggtctaaaaatacatacttaactgcttttcataaaatacaagaatatattaaggcaggagattgttatcaaattaaccttactcaagaattcaaagcgaattttactggttcattattaaataaagcagatgagctatggaatttaaccaatgcaccatattctggttatttaaaattaacagaatttgagttgttaagttgctctcctgaattatttattgaatttaatgtaaataagcaaattaaaaccagacccattaaaggtacaatgcctcgttatgagaataaagagcaggatttactttcaaaacaaactttaaaaaattctaaaaaagatcaagcagaaaatgtgatgatcgttgatctattacgtaatgatttgagcatttatgccaatacaggttcggtaaaaacaacaaaactattcgaaattgagagcttcaatcaagttcatcatatggtgagtgagattacggctacacttaaaaatgatattaatcctatgcagatgttgctcactgctttaccaggaggctcaattacaggagctcctaaaattcgggcaatgcaaattattgaagagctagaaggcgcacctcggggagcatattgcggcactttaggatattttaatttcgatggtactggacgctggaatattttaattcgtagttttcaacaatatcaaaaccagctctctatttgggcaggcggcggtattactattgcttcagaggctgaggctgaatatcaggaaagtcttgataaaatctctgctatgctgaacttgatgaacagcacagcagaataagtattaaagaatatcttgcttcaaagtttgaactaaacgcgcgttttgctcattagttccaaccgtgatacgtaaaaactgattaatgcgaggcttattgaagtaacgaacaataatgccctgctcacgtaatttttgtgcaagttgcccagcatcatgctgtgaatgcgtagcaaaaataaaattcgctttcgatggcaaaacgttaaaaccaagttcagttaaatcacgaacaagtttctctcgacttgttataactttttggcactgctcttcaaaataagcctggtcttcaaaagaagctaccgctgctgcaatagcaaagcgatcaattggatatgaattaaaactattttttacagcctcaagtgctgcaatcaagtgcgactgagcaatcgcaaatccgactcgtaggcctgctaaagaacgagactttgaagtcgtttggcataccacaagattttcatagcggtttatcaaacttacagctgactccgcaccaaaatcaacatacgcttcatcaatcacaaccacgcggtccggatttgcctgtaatacttgttcgatttctgccaagctgagcgcaatacttgttggtgcatttgggttggtaataataaccccaccatttggctgggtataatctcgcacatcaatttcgaaattctcattgagaggaatttcttttgtttttgtgccaaaaaattggctataaactggatagaaactataagtgatgtccggatacaggattggtccatcttgaagaaaaaatgctttaaagatatgagccaatacctcatcagaaccgttacctacaaaaacttgagatacatcaatattctgttgtttcgcaattgcttgctttaacactgtcgcatccggatctggatatagacgcagcacatcggcttgttcatgtaacacctcttgaactgcttctactacttttggtgatggtggatacgggttttcattggtatttaactttaatagattctggattttaggttgttcacctggcacatacggctctaattcacgaacctcaggactccaaaaacgcatttgtgctgtagatacagtcatagtcttatctcaaaaaagggctgaaagtcagccctgaataatcatgaaaaacactgataggcttaaaacttattgataacgataacgcgccgagcgtgcatgggcatcgagattttcttgaacagcaagtacatcagctgttttagccaaagtcttaacgccatcttttgaacacatgatcaaactagagcgcttttgaaaatcatatacaccaagtggcgaagagaaacgagctgtgcctgatgtcggtaatacgtggtttgggccagcacaataatcaccaattgcttcaggtgtatagcgacccataaaaattgcccctgcatgacgaatatcttggctcatcgcttcagcatcatcaagacatagttccaaatgctctggtgcaacctgattaattaaatcaactgcttcagcacggtcttttaccaaaactaatgcaccacgatttttaatcgatgtacgcgcaatctcggctttaggcaattcatttaaatgtttctcaattgcagactctactgcttctaataatgcttcatctggagtaatgaaaatagcttgagctactgtgtcatgttcagcttgagataatacatccatcgctaaccattcagcattattcacaccttctgcataaactaatatttcagaaggtccagcaatcatgtcaatacccacctgaccaaatacagcacgtttagcagctgccacaaatcggtttccaggacccgtaattttatcaacacgtggaacagtttgagtaccataagctaaagcagcaacagcttgtgccccaccaatggtaaatactcggctaacacctgctagataggcggcagctaaaacgagtggatttagttcaccatttggggctggcacaaccataataatttcaggtacaccagccacatgtgctggtaccgcattcataagtacagatgaaggataagatgcaagtccgcctggtacataaataccaacacggtcaagtggagtcactttttgtcctagggtattacccaaatcatccacataagtccagctatcttgtttttgagcttcatgaaaagtacgaatacgatcagctgcaagtttcagggcttcacgaatctcttgatttaaaccatcaaaagcagctttaagttgttgttgagacaattctagatcggaaaattgatgcgctggatgtcgatcgaactgttgagtaagttttaaaacatgatcatcaccatgctgacgaacatcagcaataatttgatctactgtttgaactaaattaggatcattaacggtttcaaaagctaaaagctcggcaaaaacctgtttgaagttctgatcttgagtcgataaacgtcgcatcaatttacccacaaggcgaaaaagaaaaaccaagtttactctttttctaagctcttgtgggcatcatatctacaactatcgcaaaagcatgataggaaattacttttaacgtgattgaacagcttgttcaagttgggaaatgattgggttcaataaaacctgtttacgcttaaagctcgctttattgacaataagacgtgaagatactttgcaaatttcttctaatggctcaagaccatttgctcgtaaagtatttccagtatccactacgtcaacaatataatcgcccaaaccaactaatggtgctaactccatagaaccataaagtttaataacatccacctgctcgcctaagctcgcataatattgacgtgtaagattgacatacttagtggcaatttttaaacgaccttttgggcgttccattcctactttaccagcagtcattaatttacatttcgcaatctgcaggtccaataactcatagacatgctgagcgccatgttccataagtacgtctttacctgctacacctaagtcagctgcaccattctcaacataagttggcacatcagacgcacgtaaaattaaaatacgaacctgcttatgtgtggttggaaaaatcaacttacgcgatttttccgggtcttcaagcaagttaataccggctgtagcaagtaaaggtaatgtttcttttaaaatacgtcctttactcagtgccaaggttaaaccatgatcaaaattacccattacgttaaaattaggatcatcgtttcttacgtcattcattaacttactcgcttaattttggcacctaaaccttgaagtttttcttcgacatgctcataaccacggtcaatatggtagatacggtcaattaatgtatcaccttcagcaaccaaagccgctaaaaccaaagagaatgaggcacgtaaatctgttgccattacaggtgctgcttgtaatttttcaacacccgtcacaacagcatcatggccttcgacctgaatattagcacccatacgtgacaattcaggaacatgcatgaaacgattttcaaaaatggtctcggaaatcgttgcaaacccacggccaattgcatttacagccataatttgtgcttgcatgtcagtcggaaattctgggtgaggtagtgttctaaaacttactgctttaggacgcttacccaacatatccaattcaatccagtcatcgccacgggtaacttcagcacccatttcttcaaacttatctaaaacagcctcaagcaatgaaggatctgtatgggtggtttttacacgtccaccagtaatcgcagcagcagctaagtaagaacctgtttcgatgcggtctgcaacaactgcatattcacagccatgtagactttctacaccagtaacaaccaatgtatccgtatctaaaccttcaatttttgcgcccattttaataagcatttgcgcaagatcagtaatttcaggttcacgtgcagcattacgaattgtggttacaccgtctgccaaagcagctgccattaaaatattttcggtaccaccaacagtaaccatatcaaaaaccacttcgccgcctttcagacgaccatcaacagtggcatgtacataaccattttcaacttcgatatgtgcacccaatgcttctagggcttttaagtgttgatctactggacgagagccaatagcacatccaccaggtaatgaaaccttggcatttccgtaacgcgctaataatggccctaataccaaaatagatgcacgcattgttttgacaagctcataaggagcaaactggttatctaaagtagaagtatccgccttaaccgtgtcattttcataactaattgtaacacccagtccaccgattaattttaccaaagtatttacatctttaagatttggaacattggttaatgtaattggagagtcagcaagaatcattgccgcaagtaacggtaaagccgcatttttagcaccagaaatgcgtacttccccttcgagcttaacaccgcccgtgattaaaaatttatccattaatatttaagctccgaaaaggcttgctttgcgccattcatctttggtcatcgcacgaattgttacggcatgaacttcgccacttgcaatataagtatttaatggtgcataaactgcttgttggcgggcaacagtacgcttaccttcaaattgatcatccacaatacggaggtcaaattttccagcctgtccgctcaccactacttccgcctcaggaaaagcttcttttaaaatttgagtgagctgttcactattcattgcaaagacctctgacacaacctacggtgtaaaacgaagtattttactataactttttcaaagaattcagtacgtgtttatattttatcaataaaaaaagaggctatatttcaagcctctctcaattattaaaaacttattaaatagaaacagcaacttgagaatacgtacattgcattttccgatattttaacaattgtttttttaatttttcagtcagtttttttattgaagtatacatatcatccgctgttgcttgagcaaacagctcaattccaggtaatcgaactatcgcttcagccacatgattagagctacctttatgtgagcgcttatcaatctgatgatctttcgttaatttaatctgcatactattcacctgatcaagatgtttcgttaactgattaaattttgctttaatattttcttctatagctggtgtaattgctaaatgatgtccacgaatcgttatttgcataattctatccctcacctttttgggttatataaagaagaactaaaacgatttaatgcaatctaaaaagatgatttgggacaattaaaccattttagctactcctcttggtgaaaatgaaatttcattatttcgtcataatgaatgagtagaatagccatacttcaaaatttagatcaagacttttctctcggatgacgatggaatatgtaacgattctctatattttgctacagtccttctagctacttctattccctcctctttcaataaagcagcaattgcattatcagacaaaggtttacgcggattttcattagaaactaactttttaatcatcgcccgaattgcggtagaagaagcctcacctcctgtggttgtccccacatgactagaaaagaagtatttcaactcaaaaagtccacgtggagtaagcatatacttatttgttgtaacgcgagaaacggtcgactcatgtaattctacttcttctgcaacatcccttagtactaaaggtttcattgcttcgggacctatttcaagaaatgctttttgatgctcaacaatacaagtcgcaacttttaataatgttttgtgccgttcatcaatactttttataaaatttttagcctcaagcatttgattacgtaggtataaattatcatcactttgatctgccctacgaatcatactcgaataaaaagaattgattcttaattttggcatcacatcagggtttaactgaacttgccaatgcaagtccttcttggcaacgactacgtcaggaatttgatactctgattcttgcttttcaaaatccatgcctggataaggctttaatgtttttaataaatcaactgcaaattttaattgttctttggaaagccctgtttgcttcaataatttattaagatcattcgcaatcagtaattcgtaatattgaagtagacttctggcttctttcaaatattcagtttctcgaggcaagaactccaactgaacttttaaacattcagctaaattacgagctccgataccaattggatcaagacgttgaatatgttttaagactactaaaacttcatcctcttccacttcctcgtctatatccatctcacttaataaatgctgtactgccaaaataatctcttctaattcagcatccagaaaacctttatcatctaaagcatcaactatgcaataagcaatcaactgatctatttttgaaaaatgtagtaagttcacttgctccaaaatatgttctttaagcgtcaggtgaacttggcgattatcttcacgctcttcgaactcaggagtacccaaagcagtggattgatgtgtataaatgtcatcccattcagtatcaacaggcaagtcatcaggtaagtgatcagcattcaactctgttgtaaggtcatctgtttctttgtgttctaaagtagataaactttctgctagtgattcatcttctactttttcaagtaatggattactatctaattgaatttggatttcttgctctaattctaggctagaaagttgtagtaaacggattgcctgctgcaattgaggcgttaacgataatgaattcgcaactttcaatccaacagataatttcatatatttctctttccaaaaaacaagcaaaaatcatgcctattaattatttatagcatagagttctgatttatcctatacattgactcatcaattcatgagaaaaatagaaatttatttattaaaaacgataggatttttattctgtcttattctttagtatcgatgattctttgaaataactcttttctgattgctttcttgatataaaaaaacacccccaaccactggttgggggtgtttagaataatgagctggcgatgacttactctcacatgggtaatcccacactaccatcagcgctaagaggtttcacttctgagttcgggaagggatcaggtggttcactcttgctatggtcgccagcacaactgtttatggatacttgcttaggtcttatttaatgccgaagcgttttccaaatctgtaacagactgggctgaattgaatcttactttatctgttcattttagctagaggtataactaaatcaagttgtcttgcatacttaagaatcgattgatgcttcatatacaactgcttgggtgttgtatagtcaagcctcacgagcaattagtattggtcagcttcacatatcactatgcttccacatccaacctatcaacgtcctagtctcgaacggctctttagaggacataaagtcctagggaaatcttatcttgaggtaggcttcccgcttagatgctttcagcggttatcccttccgaacatagctacccggcgatgcgactggcgtcacaaccggtacaccagaggttcgtccactctggtcctctcgtactaggagcagatcctctcaaatttccagcgcccacggtagatagggaccgaactgtctcacgacgttctaaacccagctcgcgtacctctttaaatggcgaacagccatacccttgggacctgcttcagccccaggatgagatgagccgacatcgaggtgccaaacaccgccgtcgatatgaactcttgggcggtatcagcctgttatccccagagtaccttttatccgttgagcgatggcccttccatacagaaccaccggatcactaagacctactttcgtacctgctcgacttgtgggtctcgcagttaagcgcgcttttgcctttatactctacgcgtgatttccgaccacgctgagcgcaccttcgtactcctccgttactctttaggaggagaccgccccagtcaaactacccaccagacacggtcctcgtcccggatcacgggacagagttagaacctcaacattaccagggtggtatttcaaggacggctccactggaactagcgttccagcttcaaagcctcccacctatcctacacaagtaaggtcaaagttcagtgtcaagctgcagtaaaggttcacggggtctttccgtctagccgcgggtacactgcatcttcacagcgatttcgatttcactgagcctctgctggagacagcgccgccatcattatgccattcgtgcaggtcggaacttacccgacaaggaatttcgctaccttaggaccgttatagttacggccgccgtttactggggcttcgatcaagagcttcgcttacgctaaccccatcaattaaccttccagcaccgggcaggcatcacaccctatacgtccactttcgtgtttgcagagtgctatgtttttaataaacagttgcagcggcctggtttctgcggctgtcgtcagctcaggaagcgagttccatcaccaacaacagcgtaccttctcccgaagttacggtaccattttgcctagttccttcagcagagttctctcaagcgccttggtctactcgacctgaccacctgtgtcggtttcgggtacgattcctgtgtaactgaagcttagagacttttcctggaagcatggcatcaaccacttcgctgtacaagtacagcttgctatcagatctcagcatagagtaccccggatttgcctaagatacatgcctacatcctttcacctggacaaccaacgccaggctgatttagccttctccgtcctctcatcgcattacacagaagtaatggaatattaaccattttcccatcgactacgcctttcggcctcgccttaggggtcgactcacccagccccgattaacgttggactggaacccttggtctttcggcgaacgggtttttcacccgttttgtcgttactcacgtcagcattcgcacttctgatacctccagcatgcttctcaacacaccttcatcggcttacagaacgctcccctaccacgtatacaaagtatacatccgcagcttcggcacatagttttagccccgttacatcttccgcgcaggccgactcgactagtgagctattacgctttctttaaagggtggctgcttctaagccaacctcctagctgtctatgccttcccacatcgtttcccacttaactatgattttggggccttagctggcggtctggattgttttcctcttgactacggacgttagcacccgcagtctgtctcccggatagtactcataggtattcggagtttgcatcggtttggtaagtcgggatgaccccctagccgaaacagtgctctaccccctatggtattcgtccgaggcgctacctaaatagctttcggggagaaccagctatcaccaggcttgattagcctttcacccctatccacaagtcatcccctggcttttcaacgacagtgggttcggtcctccagttagtgttacccaaccttcaacctgctcatggatagatcgcctggtttcgggtctatacccagcaactaaacgccctattaagactcgatttctctacggctcccctatacggttaacctcgctactgaatataagtcgctgacccattatacaaaaggtacgcagtcacaccacgaaggtgctcccactgcttgtatgcatgcggtttcaggatctatttcactcccctcacaggggttctattcgcctttccctcacggtactggttcactatcggtcagtcaggagtatttagccttggaggatggtccccccatattcagacaaggtttcacgtgcctcgccctactcgtcatcattatgtgtgccctttcgtgtacgggaatatcaccctctacgttcgcacttcccagagcgttccactaaaacacacataacttaatgggctgatccccgttcgctcgccgctactgagggaatctcaattgatttcttttcctaagggtactgagatgtttcacttcccctcgttcgccttgcaacactatgtattcatgttgcaatacctaccttaaagtaggtgggttcccccattcagacatctccggatcaaaggatatttgccgcctccccggagcttttcgcaggctatcacgtctttcatcgcctctgactgccaaggcatccaccacatgcacttaattacttgactatacaaccccaaacagtcgatgttacctacaagttagtaacttcaacatttcagtttagagcactgtgcacttaagcactgtacagcttcaatctaaattcacataccaaaacgcttgattcagttaatttgctagttctcaattcatctagattaattgcttaacctaaactcttgagtgaacaatttatttcagactcaattttgccaatctgttaatgagttaatgtgtcttcgtcagatcacactaattaccgtgataatgaaatcacagaagttaataaaccaagatctcaatctttatttactaatttctgtaatccgaacttatcttaagttctggtggagactaggagagtcgaactcctgacctcctgcgtgcaaagcaggcgctctaccaactaagctaagtccccagcttacatcatcaatcatgtatcttttatctataacttcaaccagtcaaagtcatggtgggtctgacaagacttgaacttgtgaccccacgcttatcaagcgtgtgctctaaccaactgagctacagaccctcagatacatctatgaagaacaacttgttgtggattcttaccaatcgtcaatctttcgttaaggaggtgatccagccgcaggttcccctacggctaccttgttacgacttcaccccagtcatcggccacaccgtggtaaccgccctctttgcagttaggctagctacttctggtgcaacaaactcccatggtgtgacgggcggtgtgtacaaggcccgggaacgtattcaccgcggcattctgatccgcgattactagcgattccgacttcatggagtcgagttgcagactccaatccggactacgatcggctttttgagattagcatcacatcgctgtgtagcaaccctttgtaccgaccattgtagcacgtgtgtagccctggccgtaagggccatgatgacttgacgtcgtccccgccttcctccagtttgtcactggcagtatccttaaagttcccatccgaaatgctggcaagtaaggaaaagggttgcgctcgttgcgggacttaacccaacatctcacgacacgagctgacgacagccatgcagcacctgtatctagattcccgaaggcaccaatccatctctggaaagtttctagtatgtcaaggccaggtaaggttcttcgcgttgcatcgaattaaaccacatgctccaccgcttgtgcgggcccccgtcaattcatttgagttttagtcttgcgaccgtactccccaggcggtctacttatcgcgttagctgcgccactaaagcctcaaaggccccaacggctagtagacatcgtttacggcatggactaccagggtatctaatcctgtttgctccccatgctttcgtacctcagcgtcagtattaggccagatggctgccttcgccatcggtattcctccagatctctacgcatttcaccgctacacctggaattctaccatcctctcccatactctagctcaccagtatcgaatgcaattcccaagttaagctcggggatttcacatccgacttaataagccgcctacgcacgctttacgcccagtaaatccgattaacgctcgcaccctctgtattaccgcggctgctggcacagagttagccggtgcttattctgcgagtaacgtccactatctctaggtattaactaaagtagcctcctcctcgcttaaagtgctttacaaccataaggccttcttcacacacgcggcatggctggatcagggttccccccattgtccaatattccccactgctgcctcccgtaggagtctgggccgtgtctcagtcccagtgtggcggatcatcctctcagacccgctacagatcgtcgccttggtaggcctttaccccaccaactagctaatccgacttaggctcatctattagcgcaaggtccgaagatcccctgctttctcccgtaggacgtatgcggtattagcatccctttcgagatgttgtcccccactaataggcagattcctaagcattactcacccgtccgccgctaggtccagtagcaagctaccttcccccgctcgacttgcatgtgttaagcctgccgccagcgttcaatctgagccatgatcaaactcttcagttaaaatcattttgcaccttatttatagacaaggtgccaattctggctcatcaattactgacttaaatttcgctcaaataaacttcgagtaatttaaaccaatcaatcaatgaaaattatttcgattaatcaatcagtaaaaatccacacaagttgttcttcaattctcttaatgatcttcttactggttcgtcaccagcaagctaggtcggctatattactcttaatctcttaaaagtcaacaggtaatttcgatatttttaaaacttattctctaaaccatctcatcatcaaattcatcacttaaagcaaccaatctaatcacaagtaactgtttttcaacaagtttctatctgcatcaccgccgatggatgtgcattatagaccatctctctccctttgcaacccctttttatagcatttcacaccaagcgtacattttttaggctttttggctatatttctatataatttgatcaattttacattgataatagcttatcgcttctgtattaaaatatatctctacccaactgcatattgaatatagcctggctagcggttaaggaattatatgaattattctaatttacttttgtcgagcttattaactgtaggtctttacacctcagcccatgctcaagaaaatcttactgaagaatctgccgctagttcggaagatgttacttcaacccagactcagcatagccgacctcacttacaaattattaaagatttgaaaggtataaaagttaaagatttaaagatcaacgcaaatgctgctcaaccggatacagtgaaagatccattacagtcactgaaccgtccaatttattcttttaacgatatgttagaccgccatgttttgcgtcccgttgctgttgaatatagagaaaagacgccagaagatgtacgtggttcttaccgacaatttcgtaaaaaccttggcgaaccatggaatgctgttaaccagctaattcaaggacgtcctggccgcgccgcaaaaactttaggtcgttttactattaatacgttaacaactttaggtttagccgatccagcgagccgcttaggcttacctcctgaagaagaaagttttggtgtaactctcggttactatggtgttccttctggaccatttcttatgctgcctttctttgggccaagcactttacgtgatggcgttggcttggctgtagatgctcaggcccgtccacaaaaatacattatggatgatcaagatggcctgtattggtcgactaatctattacaagccgttgatacacgcgctcaatatctagatttagaccaaactatacaaggcgatcaatatgcaatgattcgtgatttatatctccaacgtaaagcgttccagattgccgagaaaaaaggtgattcggcagatgtgtcttttattgatgatgacgaatccgaagatgtaccagaagataacactgataaaaccgaaaaataattaaaggacaaatcaaggtattgcatttttcttataataaggcaataccttgattttggtcatacatcctctatgatggataaagtgatcttgaaaaaggactaccatatcttctatgtattttattaaaccgacacgctctatccctttcgtagagcaagctctggaagcattaccagacttacaagtcattcacatagatgatctcgatttatacgacccaacaattatcgcaattgctgatgtacaagatttcctaacttataaatggcgtttacctacaatcgtgattgcttttgagcatgaaggtagtgctttagctcaagcatgggaagctggtgctcttgcaggatgggtatggaaccagttacctaaagatctaaataaagctttaacaagaattgatgcacaatataaacgtaatcaggatagccgtgatttaccttcggcagcagaattacaaaaacgtttattgccaaatcctattgatttattaaattatgaggttgaaacttttttccaaccttctgcctatttatcaggcgactggtacgactactggaagctcaatgataaagaggttttattttatctcgccgatgtatcggggcatggtgtaacaagtagcttattaacttcttggatggcagcctttcatggtcgctccaaaacaccacgacagttaatcaaaaagttaaatgggatgctagttcaagagaatattgaaaaacatattacaattgtggtcggtattctaaatcttgaaactcatagtcttcgctggtctagtgcaggccattaccctcctccaattatttttgaacctaatcaacctccaaaaattttaaccaccagcagctttcccttagggttaactgatgagttagaagttgaagaacatgtatgtacattaaatcgtcatgcacgtttcattatttgctcagatggagcactagaaccatttgatggcggcttgaatgatcagtttcaacaattagttcaacatttgcaaaatcaatcattccaagcccctgatcacgttgctgatgacattgccatctttagtctttgtcgaatgaattaatttaagaatcaattaattacataatatacgacttaaggactcttgagtctgagatggcactatgtgataatttttctatccttctctgaaaatggcatttatatgtcaacaggtcatgttgaatatgcaagtttaaatggaacgcatattttcaagcttattggtgaagtgcgagcccattcttgtataagtctagacaaacttttaaacagaattgaacagcaagaaaatgttgttggtgcaatcgttgatttaacccaaacaacatttattgatagtactgtattaggtatcctagctaagctaggtttaaaactgaaacagactcatcatattcaagctgtgatgctatctaccaatccagatatcacaaccttagccaacagcatggggctagggcaggtttttgtcatcctgaattattgtggcgatcctaacgtttgcactttaacgttaaatgacgagcacattactcataatgcgatgctaagaaccgttctggacgcacataagacattgatgaaactcaatgcaaataatcagaacatgtttgagccgcttgttaagcaattgcaaaaagaacaagacacgcttgaacaagtatctgataagcaaaatgcctaaactttattgctaatctggatgtgtatatgactcttgtttcagttgttcaaatgaattcccaagatgacattgaaagcaactttcaagtaattgagtcattgattcagcaaagtaaggctcaaaatgccagcttaattgtttttcccgaaaactttgtttgttttgcggctggcaaacagcgtgaaacagcagagcaatttgagtcaattcaacaaagacttgagaaacttgcgcatcagtatcaaatctggattgttgcaggcactctaccgtgcccatttcgtccggatggttccatcatacaagatggtcgagtgcgtacagtgagtttatgcatcagtcctgaacgtaccgaagcacgttatgacaaaatacatttatttgatgtacaagttggcgatgctgtgggtggatatcaggaatctcgtttctttgaaccaggaacagacgttgtagtcacatctaccccttttggcaatattggcctaatggtatgttatgacttgcgttttcctgagttagctttaacccttagacagcaaggtgctcatctattaactgctcctgctgcatttacctatacaacaggtcagatgcattggcagcttttgctgcaagcacgtgcaatggatagccaatgctatgttttaggggctgcgcaacaaggttggcatggggaaaaacgccaaacttgggggcatgcaggagcaactgatagtcgtggtcaagttttaagtatgattggttatgaagggaatggtttaattacggtaccttttgatttagctgctcaagaacttgtgcgtacatcaatgcctttaatgatgcatcgtaaattaattcactattaaaagcttaattattcatgtggaaatacttatttagcattttttgcttaggggcaaatattcactgttatgcgactgatttcgggacaacgaataattttgtctctccaaatttgcagcttaaacaaaatgtactacctcctactccaaaaaatattcctctgcctgcttttggccagcggattattggttgggggacaggtgcagaaggtgccagacagcgtttagagaatattcagcctgccgatgtttctatgattaaaaaacaaggaacaactttagaaatgatcacggcctggcaagatttttatgaacaagagcaacaacgtaatgaaaataacccaactgcaaaatatcgtgctcgtttaatgaaaaaaattgccgacctttggtaaccattttaaattagtatttttaagtgatggagtaaagtttagattactccatttttttacgttatcttatttttatcaatagctctaaattatgagcatttaagaaattaaacataaagcgatatactagaaaagcacccattagttttctgaggaatatatggaccaagactgtcaaaatctaaagcttgagaatcaattatgtttcctcatttattcaacaaatttagcccttaatcaactttatcgcaaacttttaactccattagggattacttatcctcaatatttggtgatgttggtgttgtgggaaaaagatgagattactgtttcagaaattggcagcaagttatttttagagtcttcaactttaaccccaattttaaaaaagttagaagcattgcagcttcttaatcgtactcgatcaaaagaagatgaaagacaagtcattatcacgcttagcgaaaaggggaaaaacttaaagaacaggccgtaaatattccaaagcatatcttagaggccagttcttgtgatacggctacccttctcggtctcaaagatcaattaacacaactccgtacaaatatagctaaataatcaccaatttttttacaaaattgacttgttaaaataattaagtcgtgtacgatatatttgcattcaatttaatttaggaataaaaagatgtcattagaaaaagttgtgtatcgtgcaaaagctaaagcaacaggtggccgtgatggtcgtgcaacttcatcagacggtgtattagacgtacaacttggtgtacctaaagaaatgggcggtgctggtggtgccgtaactaacccagaacaattatttgcagctggttattcagcatgctttttaggtgctttaaaatttgttgcaaatcgcgataaattcaatattagcaaagatgcgtatgttgaaggtgaagtcggtattggtccaattccaacaggttttagtattgaagttactttaaatgtttatttaatcggtatggaccgtgaagaagctgaaaagttagttgcagcagctcatatcgtttgtccatattcaaatgcaactcgtaacaatattgatgtgacgtttaatattgtgactgaataagttttaatataaaaaatgcccgaatcatatcgggcattttttatatcttacaaattatgcttcacttgcttcattggttacacgaagcacttcttcaagtgtagttttacctgagagcaccttacgtaaaccatcatcgcgaatagaaccagaatactgacgagcatgattttctaattcaaattcagctgcattaccatgaatgagacggcgcataggttcatcaataggtacaatttcataaatcgctgtacggccattaaaccctaaatgagaacactgatcacacccttgagcctctggtaactttaaacttggttcatggaaaatatgctgaaaaacttgcttctcaaaagtatcggcttcacgccatgtcatacaatgtggacataaagtacgaaccaaacgctgcgcaaccaccccaattaaagagcttgaaagcaggaaaggttcaatccccatatctttaagtcgagtcactgcaccaatagcggtattggtatgtagtgttgataacaccaaatgacctgttaaagatgcctgcaccgcaatttcagcagtttctagatcacgaatctcccccaccatgaccacatctggatcttgacgtaacattgcttttaaagctcgagcaaaagtcatatctactttggtattcacttgagtttggccaataccttcaagctgatactcaattggatcttcggcagttaagatgttacgggtgttgtcatttagatcagataaggcagcatataaagtcgtcgttttccccgaaccagtaggccctgtgaccaaaataataccgtgcggacgatgtactaactgagttaaacgttcatagtcatttgccattaaacctaggtgagtcatattaaggcgacccgcttgtttatcgagtaaacgcatgaccaccctttcaccatgtgacgatggcaaagttgaaacacggacatcgacttcacgaccagcaagacgtaaagaaatacgtccatcttgcggtacacgcttttcagcaatatcgagtttcgccataactttaatacgcgaaacaagtaacggggctagttcacggcgtggctgcacaatttcacgtaattgaccatctacccgtaaacgaactgatagctttttctcaaaggcttcaatatggatatctgaagctccaacacgaattgcctcagagagaagtgcattgattagacgaacaataggcgcgtcatcctcttgatccattaagtcttctgtttcaggcacctgatctgcaaggcttaataaatccggatggtcttctaagcctgcagctacttgttgagattcacctgtatcacctgcataactggtacttaatagactattaaattcttgttcagtgcataattgatagtgtgcaggtttccccaaaattcgtcttgcttcctgcaatgcaattttttctgtattttgacgtctaacaataaaaacttgatcaccgtcataacgaaataaaacaccatgacgcttggcaaaactatatggaacttgtatttgtttcaatatttgcatcacaatttataatgatgagtaagatgattttgagtgtactctaagcagattacagcgtgaagtctgtttaacaactcggtagaggaattttacgtcttgtttgaaaataatgaatatcagcctcacccccagaattctttaaaatggtggggtgaacagcactttgaaattaaccagtccaaagcatggcaattcggttcaatgctctttcgtttaacacgtggcataaaagaatggcgtatcgaatattatcgcccgactctccaagatgataatgagcaagattggcacatcataacggatgcaaattttggttttccacattctgtgcaagttgaacgttatatgtttcggaaaactaatccgaagtttctactcatgccacgtttggcggaccgatcagtggtaattaaaccagttgatccaatctatattccagcgggtcaacgagggacactttatattagtacccccctatggattgccggtttagttgaaagtcagcatgaacctttatttgagattcctgtaattcaacccaaagatacatggtttggtcccaatgcccagcaaggtgaaatttgttatgcaacctctgttgatggtcgtaccgatttaaatctattaaccccacgtgcttttcgtgcagttacgccgattgatttccataataccagtaatcatcaattacgctttgaccgtatgaatgtaccggttactgccctaccgctattttatagtgaaagtacaggacgcttatggacatcacaaatcaaagtctactatgaaggctctgaccgcccagcccgtattcgtattgaaaaccgtactccccctctggcaggtgaagtgacttatgttcacccaccacgttcaccgggtggtgcgctatttaatatgtttgattcattcttttaagggggttttatggccgattcaagtattccaaaagatatcgctgatagcctcaaaagcatatttaccaatatcaataccgaacgaattagtgaaattttagtcggtgttgtgctttgttttattggttttgtccttgcccgtattatttcaaatacatttattagaaccgttggctcacgttttaatgctcaccagcgtctggtatggcgccgcggtattttctattttattttcttactcttcattatgacgagtttaaaagaagccgggttcaaacttagtgtatttctgggggcagcggggatcttaacagtagcactcggtttcgcatcacaaacatctgccagtaacttgattagtggtttatttttgattggtgaaggttcatttgaggtcggtgatacgattcaaattacacttattcgagggaatacaatcgaaggcgaagttatctcaattgatttgctttcggtaaagttacttacactcgacaacgtctatattcgtttaccaaacgaacaactcattcgtgctcctgtacacaacttatcaaaatatccaatacggcgtattccaattactttggcaattaactttcatgaagacattattaaagtccgtgaggttctacttaacgtcgcagcaaattatccactcgtgttagatgatccaaaacctgctgttacagttactgccttcagggagtcatcgattgagcttttatttgcaatgtggtgtcgtcaagaaaactctttaaaagttcgagatgaaatgcaagaacgtatccgaaatggttttttagataaccaaattgagattcctgttccgaaaatgggcttaattgatcgaccatctactgcttttgctgaagatgatatcgatcaatacagcaatcaaaaagagttaaaacgagagcctaaagcttaggctcttgattcttctgtacagaggatgacggtggtaatggcgcaagataagcaataatcaacattaccccacctgctccaataaacgaaatgacccgagttaatgtcgcactttgtgatagatcaagcaaaattagttttaatacaacaatccctaaaagtgcagcgcctacaaaccagagttgacgaatcatttttcgactagagtatgtagtcaaaacaaatgccaatataacccaaagtaacgtcaaacttagctgtactacaccatttgtccaaattgaagcactccatagcggagttgcccagtaatggtgcaagcctctgacgactacactactaaataccagtaagcccactaaaattgttgtaattttaaaagtccattccagcgatttatcttgatcaaaagcatgctgataaataataaagagcagacctgcaaatactacaatagaaagaaaatcagttaagttaaataaaggaacaaagtaaagatattcagcagaatgaacatcaacactcaccacaagcaaccaactgaggcttaaacaccacaccggaatttgatgcaatagtgtcgttttatgagttttataagcccaaagcgaataaatcacaggaacaaaagccaaagcgactattggcatttttgggaaaatagccacgccaactatcgctaacgctaaccagcttaaacccgcccataccttgacgtaacccaaatgacttgactgcggttgagccataataaataagccactaagaataatggtagagactaggaaagtagtttgttgtaatgagtctacccatttaaacaaagtaaatacttgactcgcaaaggcctcccctaaaaccaataacagtaacaggctaattaaaattaactgcaaactttgccattgcacacgaagtttatagtgaacaatcgcactaaatattgctattagagcgatagcaaacatcaaatatggacttaaagcatgatgatgccatgccattatttctacacctgcaacggcgcccgcatacatgcctaagcataagaaaataccgctaaacaggcttgcgctaaaatagcgttgttctttgctgttgtattgcaataaataaaaggctgaaatgaattgggcaattgcataaatgctagtgcttagtgttggaaactcttcatttgcccaaacctgataaaacagtgcaagtgagctaagtaaaactaaaatcacgccaatatatcggcttaaacggtagcgttcagttactccccaaacgattaaagccgttccttgtgcaacccagccaatagcagtccagtgcgccccttttgcgagtggaaaaattaaggcaaaaaaagcaaccgcgagaatgaaaaaactttttgcaaggaccgaaagctggggatgagtttttttaatccagaacgttaacaccgcatagatgcctgctaaaacagcagcaccaattgttaaagcttgggtcgactcatgaactaaataggcatgaagcgtaaagcctagtacaggtacactaaaaataagaccaacatctaagagcggaggtaaacggatcccctcttgtttttcatgttctgaaacccgagagatattttggctataacgaacacttaaccaaataaatagcgctatatggagccataaaatccagtctaatgtgtcaaattttgctggctctgcataaaatacgattgcactaccgccaataaacattgtggcaaagaaagcgatctgatttaggattttccaaggctgaataaaattaaccgcagcgactgcaagattaataacaagatagtaactaaataaaaaaaccacatcaggacgatattgcggaataactaaaggagccgcatacgccatacccagtgcgagtattgccaaataaatagcttgttgttttaaactcaggaatactgtaattgctaataaaatcgtaaatagaatactggctgtagttaggctggtgattacaccaaaatgatgtgagaacacaagcgttagaaagacaacagctaaccctacaccttgcagtgccacagcaaatagctgatttttcttttgcaaggtatatccaaatgctgttaatacacctcctgcaatcgcaataaaaccaagttttacacctaagctcaactgccagtgctcacttgcaaaacgcagtaagagcactaccccaaccataagcacagcaacagcaacccttaaaattggattaccatgaatcatccaatcgactgctggttgccaccatgcggtggtctgcgtacgaactgtttgtttttcttgatttaatgctattgttccaggtaaagctggctcggtaatattgtttggatcaacttgccctaatacaggcgttatcacttctgtatgtatagattcatttacatttactgtttgcttggctgtctcgaggaacaataaacgagtatgaaatgcactgatggtttgaatcaaacataacagtaaaaccagtaatgccccaccagcaatccacatccaatgattgatataagcaactaatgcaaccaaagcggcggtataaattaccgttctttgcatatgaatagaataaagtggcgttgtctggtgagaaaactgttgttctaaatgagttaaacgttgatgcagacttgataatgactgaaccagtatgacagtgaatgcaatagataaagcaacaacggcactctgaaatttaaaaccaattgaaatggctaaaaacaaagtcaaagcgatcaaaacgatgatcattccctgtttgtcttttttatacatgggcttagcaatatgacaccttcattacaaatcatcttacttcaagccaatacatgcgtatatttatacatacaaaatactgcaaaaatcataaacctgcattcatagccgttttcacgtaaaatacccataattcagtttaaggaattgttcaatgccaccatttgtcttggttgatgggtcctattttttatttcgtgcatatcatgcattaccaccattgacgacctctacagggttacataccaatgcaatacgtggagcaatttctgccattcaaaaattgatgcgtcgtatgcaaccgacacatatggctgtcatttttgatacgcctgagccaactttccgtcataagctttcacctatttataaaggtgaccgcccgactatgccggaagaattgtctcaacagattccatatttacatgcattgattaaggctcaagggattcctttatatagtcttccgggtgcagaagccgatgacattatcgggactctcgctaaacgcgccgtaaaagaaggtcatcatgtccttatctcaaccggagataaagacatggcccagctggttaatgactatgtaaaacttgaagatagctttaaagatcgagtgctagacaccgacggcgtatttgaaaaatttggcgtttggccaaaccagattatcgattacttaacccttatgggtgacgcatctgacggcattatgggtgtacctggcgtaggcgcaaagacggctgccaaattactgactgaatatgggacattggataatatcattgccaatgtagaccaacttaaaggcaaactgagccaaaatattaaagataatttagacaatattaagcttgatcaccagttggcaagcattgtctgtgatcttcctttagaactcgactggcatgaattaaaacttactgatccaaatgtagatgccttacgcaatctctatacggagcttgagtttagaaaccagttacagtctctcgatcatccaaacaatccaaatagctcaagctataagcagcaagcttcacaaactattgtccaaaatgaagttaaacctgctcaaacgattgaaacagaagatcaagcaagcttgactagtcaagatgaccagcttggaactgcaaactatcacactgttttaacacaagaagcatgggatcagctctggcaacgcatgcagaatgccgatcattttgctattgatacagagaccacaagtcttgattaccgtattgccgagatggttggtttttcaatcgcatttgatgcaaaagatgcctactatgttcctttggcacataattacgaaaatgcaccacaacaactggaccgtgaacaagttttagcgcaaatcaagcctatacttgaaaatgaagcagttaaaaaaatcggtcatcatcttaaatatgatgcgcacatttttgctaatcacggtattgaacttaaaggttggtatttcgatagcatgctggcatcttatgtactgaatgcagcagctactcgtcatggcatggatgatgttgctcgagtttacctaagccatttgaccactacttttgagcaaattgctggcaaaggtgcaaaacagaagacttttaatcaaattgagattgaagttgcagctcattatgcagctgaagatgctcatgtgacctatcgtttatatgaagtactttcaaataaacttaaagcacatcctgaattagaaaatattttatataacatcgagatgccagttgctcgaatcttatcgggtatggaagaagatggaatccgtttagatcatgctttcttagataaattaagtgttgaatttgcgaaaactatggaagaccttgaaaatcaggccatggaaattgcaggtgaaacttttaatattgcttcgcctaaacaagtaggtgaaattctatttgataagttaggcattaaaggtggtaaaaaaactgcaactgggcaatacagcaccagtgaaagtgttcttgaaaaaattgagcacccattaacggaaattattttagaacaccgtggattagcaaaattaaagagcacctatactgaccgtttaattgagcagtcgcataatgatacccatcgtgtacataccagctatcatcaagcactaacggcaacaggtcgcctatcctcttctgaccctaacttacaaaacattccaattcgtagacagattggccgtcaaatccgtaaagcatttattgcaccggaaggacgagttttgttagcagccgattactcgcaaattgaacttcgtttaatggctcatttttctcaagatgatgccttagttcatgcattccaacatggtcaagatgtacaccgtagaacagcggcagaagtgttaggtattgcaattgaagatgtgaccaatgatcagcgccgtcaggctaaagctgtgaatttcggtctactttacggcatgtccgagtttggtttaattcgtcaacttggctttactcgtgaagaatcgcaaaactatatcaaacaatacttccagcgctatcctggcatttacgaatacatgcaacgtactcgccaagtagcatcggaacaagggtttgttgaaactattttaggtcgccgtctgtatacaccggatattgacgcccgaaatgtgatggtacgtaaagctgctgaacgtgctgcaattaatgcacctttacaaggtagtgctgctgatattattaagttagcaatgattgaagtagataaaatcctgccaaaagatcaagcaaaactattacttcaagttcacgatgaattggtgtttgaagttgattcaaacattgcagatgaactttcaaaacaaattgcggatgtcatgcagtctgttctggaaatttctgtaccgttagtcgtagaagtaggccaaggtaaaaactgggatgatgcccattaatttatcgataaaccaataaaaaagggctgtaatacagccctttttttaatcttacaaaattaaagtccagttaataaaactttagcgacttcattcattaagatctcggcaatatagagtgccaaaaatgccagaattggagataagtcaatcatccccatattaggcaataaacgacggaatggggcgagtaacggttcagctaaatcttgaatcacctcaatataaggtgaacgagattgagtaaacataacgacccaactcaaaatgattgttgcaaaaattaagtaacggcagaaacgaatcaaatcctgaatcatggtcacaaaagtcagaatcactaaatgaaccggactatttggcatggaacccgaaagatacattacaccgaaaattttcagtaaatataaaataattaaaagaaccaacgctgccagattgaatcggccttttgcgaccgttggaaaaattcggccaaaaatatcaacaatcttagtcgcctttactgtcgataaaaccacaggattataaggacttactgccgccaattgcattaaaaaacggaaaaagaccaataaaatcgcgacgttaattaaaattccaaaaattagcgcagaatttgcacccatagttgtcttatcctattaaagctattttgcactgtcactcagttcttgagccaattcttggctacgtttctgtgcagcagctaatgcagattgaatattttgagagatttgtgcacgatcaaaaacttcaagtgcagcttgggttgtaccattcggtgacgtcacatttttacgcagctcagacggagtatttgaactcgtaattgccatttgagctgcacctaatgctgtttgaagagttaaagcagttgcaactttttcatccaagcctaaatttttacctgcacgaatcatactttccatgaggtagaagaaataagctgggcctgaacctgaaactgccgttaccgcatcaatttgagcttcggagtttacccaaattgttaaaccagttgctgctaaaatctgactcgttaattcacggtccgaggcaccaaccacatcagtcgcgtaaataccatgagcaccagtttgaactaatgcaggtgtatttggcataactcgcacaatacgttcactatcaatcaaatttgatattgtcttaatttccgcaccggcaataattgaaataaccaatttatccgataataaaccttttaacggacgtagaacatttgccagaacttgtggttttacagcaagaacaactacatcggcattctggatagcagccgtattatcttgagttacatgaacttctttttcttgcaatagttgacgaatttgttcgacaggatctgaaacggtaatacgtgttggtggtaatcctcttgaaatgagcccgccaattaatgcttgggccatattaccaccaccaataaaacagatattacaattcactgctgttgccataactatattcgccatttaccagattacaagaatgagaaattaaatctggttgccaccctccttcctcacaatatggagactgagccaaccaaaatcctttcggtgtaaaaaccccaagcataacattatctaagactaatatttgaattgtatgacgaagccaaggcaaaatatgtgcttcttgaattgctttttttaaaggccattgcccaacacgaccatataggtgaatcttttccccaccttgacgtcgaatgatttttaattttttattcaataaagaatgacttaaaccaatttttttacactcaacatggaatagtccagctgcgccctgccatctttcttctaatttaaatgaatgctctagttcagcatcaaccggatttaaagtttcagcgaaataaatctgtttactcaacctatagagtatattttgataacggacatagtaaaactggttccaatgtaaagcggcttgagcatctgacttagactcaataacttctgttcttagccgttcgaccatttcaaatgcaggtcgatattgcccttggcctttcatccacgcagaaagtaactggcgctgccgcgcaaaagataactcggataatttcgttagatctaaatagtcagctgaaccagaatattgccaatcatctttaagaacttcttctaaaacttcagaagcatcttgcatcagataactggttcggctcaaagcttgctgcatttttggaaaacggcttgttaaaaatggccacagtgcttcacgacaccacaccctatcgtaatgggtgtcatagttcattggatcatcaatatatttaacttcaagctgagcggtccataaagcgatttgctcacgtgttaaatccaaaaaggggcgccaaattgtcatatctttacggtaatcaatagcctgcatcgcagcaagcccatctactcccgcacctgacaataatcgcaaaataactgtttctgcctgatcttgttgatgatgagcaagcaacagaatttcattttcttgtaaatgttgctgatatgcttgataacgtgcttgacgtgcttgagcttccagattgccgtttgcaatctgaactttttgaataatataaggaatatttaatattgttgcctgtgtggcaaccacttccgcccactctgcactttgatcttgcagttgatgatcaatataaattgctcggatcttttgagggaaaatttgagccattaaatgtagtagtagcattgaatccatgccaccactacatccaataagaaaagaacttttttcagagaactcttgagcttgctttaagacgccacgcctaaattttcgctgccaaacttcattaaacgttgataacgtgcttcgcatcgttcatttgcatccattggtagcaattcatccaaagcctgctttaaaactacttttaagttttgcatcacacgctcaggatctaaatgcgcaccttcaccttcatctactacgtattcaacaatacctagcgattgtagtttatctgctgttaaacctaaagcttcactcgcttgagctgctttctcagcagttttccacaaaatagatgcacagccttcaggcgaaatcacagaataaatactatgtgacaacataattactctgtcagcaacaccaatacctaaagcaccaccagaaccaccttcaccaagtactgttgcgattacaggtactttcaggcttgaaagttgagcaaggctagtcgcaattgcttctgcctgaccacgttcttcagcaccaacacccggatatgcgcccatagtatcaataaaggtgaaaactggtagattgaaacgctcagccatatctaaaagacgctgagatttacgataaccttctgggttacacataccaaagttgtgctttaatttttcacgggtactacgaccacggtgttgtccaatgaccatcacaggttgaccgtcaaaacgagcaagaccacctaccatcgcaccatcgtcaccaaacaaacgatcaccatgcaatgcatcaaactctgtaaagatttcaccgacataatctagaaactgcggacgttcaggatgacgtgcaatttgaaccgttgtccacgctttggactgagtagcttttttcataggtcgaatattatccctttaatcgataaatttttccgactgaatattcaattcaatgtcccaatgcttaaactgctcttgctcatcatgcaagtcggcaactaacaatggccattgtttggcatcaccagaaacactaagttgccattgttgatcatttatgatggtcaattcaatggcaggaagcatctgatcactgcggctatggttgagtaaaactgctaggcgaagtaacaaacttaaataaactaatttatgaccgccagcctttaaaacttcattttttacatcatttcgcaatttacggcggtgatgagcaaccaaatgtgaaagatgattttggtcaatttgtgagaaaccaggaatatcggaatgttgcaataaataagcaccatgacgatgatagccaccatgactaatcgctaaaccaatttcatgcaaatatgctgcacggcgcagtaagtcactgtcttcactcgttaaattaagtggtttagcaacactatcaaataagtattgagccgtatttacaactcgttctgcctgtttcggatcggcgttataacgtcccattaatgcttgtacactacggtcgcggatatcctcatgcttaaaacggcctaacaggtcatacatgactccttcacgtaatgcaccatcagaatatgccaaacgttcaatttctaaaacttcaaaaacagcgtacaaaattgccaatccggctggcaaaactgctcgtcggtcttctcgaagtccttcaaaatcaatttcagaaatatttttgaacttaagtaacttatctttaagtttatggagaccttcacgtgtgacattttcttgctcgtcacttagccccatattcaccataatctggcggcaagctttaatggtcccacttgaacctacaacagtatcccacccttccatcttataagtggtggcgattgctgaaagctctttacgcgcagcaacaactgctttatcaaatgctttttgtgtgatttcaccatcggcaaaataggcttttgtataggctacacaacccatctgtaatgattcagtataaattggctcaaattcttcgccaataataaactcggtagatccaccaccaatgtcaaccactaagcggcgtcctccattggccatcgtatgtgatacaccaagataaatcaggcgtgcttcttcacggcctgcaataatttcaataggtttaggtaaaatttcagcagctttttgaatgaactcatgtccatttttagcctgacgcaaagcgttcgtcgccacaattcttaaacggttaggttgaactgagcctaaacgcccaacaaaacgagccaaacaggctaaaccacgttgctgtgctgcttctgttaagtttttattttcatcaagaccagctgcaagctgtactttttctgacattgaagccacttttttaacttcaccgtgatctacccgtgcaatggcaaggtgaaaactgttcgaccccatatctatggcagcaagtaattcttcatcaatcagaaagtcagacattattgaactaaacccataacaattcacgcctagagtaattcacaagaatgcaattgaaaagccattttcatcaacaattaatagcgtttgatatttttctatttgttaaacgattgtacaagccgatgatgaatatcgtgagcatccattagacaaatttacttaagccttgaataatagcatcaaacccttacattgaactaagtagctatgtaatactgatagagattatctcctcctatagtgatagcacttttttctaaaaattggagccgtaccatgtctgcgactattgtaaatacaactgatgataacttccaagcagatgttctagatgctgaaacacctgtacttgttgacttttgggcaggttggtgtgcaccttgtaaagcaattgcacctgttcttgaagatttatcaagtgaatatgcgggtaaagtaaaaatcgttaaagttgacgtgacttcttgtgaagagacggcagtgaaatacaatatccgtaatattcctgctctattacttttcaaaaatggtgaagtagtagctcagcaaatcggcgctgtgcctcgttctaaactcgttagcttcattgacgaaaacgtttaagacgtaacgttacagatgaaaatacgctatacctttatagcgtatttttttcggctataaattgacaaattagctgatctcacttatattgcatgctcaagaggcactgaagggaatcgtcttctgtccggcttcttacaagatacaaacataaagatcgccactcggcaacagaaattgttttttcacatttctcttcgaaacagttaatcagacttctgaattgttattgtgtaaatacaattgcgatactcttttttgtatgcgagcgatttttcttctttttaaaccacactctactctttcctaattctgacccttatgaacttaactgaactcaagaaaaaaccaatcggcgaactaattaaaattgctgaatttatgggccttgaaggtatggctcgtaaccgaaagcaagatattatctttgccatcttgaaacgccatgcgatgaatggcgaagaaatttttggtgacggcgttcttgaaattctctctgatggttttggttttttgcgctctgccgcaggttcgtatttagctggtccggatgatatttatgtgagtccttcacaaatccgacgctttaacttgcgtacaggtgacaccatcacaggtaccattcgtccaccaaaagaaggtgagcgttattttgctttgctcaaagttaatcaaattaactatgacacgccagaaaattctcgtaataaaatcttatttgaaaacttaactccacttttcccgaccgaacaactggttatggaacttggtaatggtacaacagaagacttgaccgcgcgtgtagtcgatttagttgcaccaatcggtaaaggtcaacgttctattattgtcgctccgccaaaagcgggtaaaacaatgttacttcaaaacattgctcaatctattgtgagaaacaatccggaagttttccttattgttttattaattgatgagcgcccagaagaagtaactgagatggagcgtaccgtacgcggtgaagtcgttgcttcaacatttgatgaagcaccagcacgtcacgtacaagttgcagaaatggtcattgaaaaagcaaaacgtcttgttgagcacaaaaaagacgttgtgattttacttgactccattacacgtttagcccgtgcatacaacacagtaattccttcatcaggtaaagtattaactggtggtgtggatgcacatgctttagaacgtccaaaacgtttcttcggtgctgctcgtaatatcgaagaaggcggttctttaacaatcatctctactgctcttattgagactggcagtaaaatggatgatgtcatttacgaagagtttaaaggtacaggtaaccaagaaattacacttgatcgccgtattgctgaaaaacgcgtcttccctgccatgaatattaagaaatctggcacacgtcgtgaagaacgtttaatggatgaagataaattacgtaaagtttggattctccgcaaacttcttcaccctatggatgagttggcagctatggagttcttacttgatcgtatgaaagaaaccaaaacaaatgatgatttctttgatcagatgaaacgtaaagcttcaacataatcatattatttattctaaaaaggccgctctattgagtggccttttttatttggttgacaagctttacacaaaaatacattttgctgatttttatgtaaaattatttataagtttttgaaaacaaatatttttaatataaaaaagccatgttttttagtagcttacttataccttttccaatatatctcagctgattaattgtttttttctgttaaaaaacaggcttttttcactcttttcccgatcttttttgacagccaacagtagtatttcaacatttgcagtgatagcatagcggcagaccagttagactgctccatgcgttgttacctagctacgttttaggaataataaaagcaaaacagtccaacttaggtttttttaatctcaaatcttttttgtgagagtgatgccatgttattcaaaaaatttgctgttgctgctgctgttgctgctactttagctttcgttggttgttctaagaaagaagaagctccagctgctggtgctgcatctgaagctgtagctgctgcttctgaagctactgctgctgcttctgaagctgctgtagctgttgacgctgctgcttctgaaactgctgctgctgcttctgacgttgctgctgctgcttctgacgttgctgcttctgctgcacactaatctacactctagattagctaaaaaagaggacattttgtcctcttttttatggctaaattttatgtttagacatcaaatagatttgatgtattaatggctaagtatacttttctaatattaagaaaaatttattctaggtttatttaaaattataaataaaaaaagcagatcaatcgatctgctcatttccaacgcgttgtctaaatttctgacccgctctgaaggtaactacacggcgtgcagaaatcggaatttcttcgccagttttcggattacgtcctggacgctcgcgtttatctctaagctcgaaattaccgaaaccagaaagcttaacctgctcgcccgcaataagcgcttggctaatttcgtcaaagaacaactcgaccatttgttttgcttcacggcgatttaagctggttaactcacttaaatgatcagccatgtctgctttagttagtgctgtcatgaggccctcaatgtcgcttgataagtgttttccaacacttggattatattgtccataccagatttaatttcagcatcttcaagcgtacgtgaaggatgttgccataataacgcaaacgctaatgagcgtttaccttcttcgacaccctgccccgtatacacatcgaataaccaagtagagtctaaaagctctccaccagttttttcgattaactgctgaatatctctaacatttatattatcagagattaaaagcgcaatatcacgtctaaccgaaggaaaacgtgataattctgtaaaattagatacataagattgcaaaacagcagcctgatcaagctcggcaacccaagttgtgctcaaatctagttcgttttctaaagatggatgcaagcggcccaagtaaccaattgattggccatcaactaagatttcagcagattgccctggatgcaaccatggacgctctgaacgtacatactcaactttgacacgtccagcagctaaaatctcttctacttcacctttaaaatcgaagaaatccattggctgtggcttagcatgccatgattcaggttcacgagaacctacggcaactaaagccaatgtaggaatttgcttcagatcctgaatagaattagcattttgataatcaaaacgtaaacctagttcaaagaaacgtacacggctttgctgacggtttaaattatattgtacacaagggattaaactcgaaagcaatgtgctgcgcattacagccaaatcactagagattggatttgccaacattaacggacttacttgcgggttcaattgcttttcaagttttgcatcagcaaagctaaagctaatcgcttcttgataccctaaagtgactaccgtttgacgtaactgcgcgatttcaaaacgatcttggtacttagcaagttgaacatccatacttggtaagctgatctgaatattgtcataaccatcaatacgtgcaacttcttcaatcaaatcttgataaattgccatatcgtagcgatgtgatggtggaactacgctccattcaccattcgcttgaacagtgacttcacaacctaatcgagttaatgcatctgtaatgaactctgccgctactttgtaacccaacaactggtctacttgagcttgcttaagttcaatcgcttcacgtttcggaagtaaatcagatttttcaactacagtaattggaccgaactcaccacccgccaactcttgaataagctgagaagcacggttcatcgcaattaatggtaattcaaaatctacaccgcgttcataacgttgtgaagaatctgtatgtaaaccaaagcgacgagcacgtccagcaatcgcaagcggagcaaaaaatgcgctttccaagaagatatcagtcgtatcatcagttacgcttgatgctagaccacccatgatcccagcgattgctagtgctttttggtcatctgcaataaccatcacatcatcttgtagttcaacttcttgatcatttaaaagctgtaacttttcttgtggctgagcttggcgaacatgtacagtcccttcgattttagctaaatcgaaagcatgcattggctgacccaattccatgaggacgtaattcgttacatcaactaaaatactatgagtacgaattcctgaacgtgctaaagcctgttccatccattcaggggtcgcagctttaacatttacatttttaatgacacgtcctaagtagcgtggagcaccatccgtgttgatgactacttttttctcatcagtaattgtcgcatcaactgatttgatttcaggctcattcatttgcagttggttaatcactgcaacttcacgtgcgataccacgaatactaaagcagtcaccacggtttggtgtaatactaatatcgatgacattatcatcaagttttaagtattcacgaatgtttacccctactggagcatcatcaggtaactcaagtaaaccatcgattttatcttcaaggtcaatttcagaggcaccgcacagcatgccttgtgactcaacaccacgaagcttaccttttttgattttaaaatcacccggtaatattgcaccaatagttgccacaggtgctttcattccagcacgaacgttaggagcaccacatacaatttgtaaaggctcacctgaaccaatattcactgttgttacacgcagacggtctgcatcagggtgctgttcaactgttagaacttcaccaactacaacgccagtaaatggcttagcaacaggtgccagctcatctacttcaagaccaagcatagtcaactgatcagataatgtatcgctatcaattgctgggttaacccatgtgcgtaaccaattttcgctaatcttcatctttataaaaccttatttaatcctgaaaaaatgttaggcaaattggcgtaagaaacgcacatcattttgatagaacatacgcaagtcattaatgccataacgcaacattgcaaaacgttctacccctaaaccaaaagcaaagcctttatatttatcaggatcaatccccgcagcacgcaatacatttggatgtaccatgccacagcctaatacttctaaccaacgtccacgctcatccatgatatccacttccgcactaggctctgtaaatgggaaatatgatggacggaaacgtacttttaaatctttctcaaaaaattcattcagtaggttaattaataaaccttttaattcagcaaagctggtgttctcagcaacgtacaaaccttcaatttgatggaacattggcgaatgcgtttggtctgagtcgcagcggtatacacggcctggacagacaatacgaattggcggctggcttgtttccatggtacgaatttgcacaccagaagtatgcgtacgcaacaaatggtttgcatcgaaatagaaagtatcatgcatagcacgtgcaggatggtgcccaggaatatttaatgcttcgaagttatgatagtcatcttcaacttctggtcctgtagcaaccgtaaagccagctttagtaaagaactggcaaatacgttcttgcacttgagtaacaggatgaactgtaccaacgcgctgtccacggcctggcaaagtaatatcaatggtttcacttgctaatttttgcgccagtgcagcttgttgtaatgctgtttgacgctcagttaaagcgttattaattgtttctcgaacagcatgaatcgcagcaccttgtactttacgttcttcagggtccattttccctaatgctttcgattgttctgcaagctggctttttttccctgtaaattgcacacgcacctgatcaagtgcaacaaggtcttgagctgctgcaatggcagcaagcgcttctgtggtcagggcttccagtgacatagtaactctcaaagcaacaaatttaaaaatataataaaacactgcattctaacagtttttcaccgtattgatgaagtttatccatcatgaaaaatgtattaggcaacaaaaagataaaacgtataaaataatagcatcgtcaatgagatcaattattatggcgcttaatcagatttggaaacaacaacttacacttgtgacctatggtaacgaatacctacgtcagaatttaagttttagccaatggcgacaacatcatatttttgaccaacatagttttcaatttcgtgacttaatttcacaacatttacttgctcaacatttccaagtttggttagaagcactcaaaaaacagggaacaacccagatctctcttcacttatcaacaatcttaaatgaagagcaaaatccaaataataatgtcgaacttttaccttatgctcattttattgtaagtcatcaaaacaataagaaaatcgcatggatttttggacatgagcttgccgaatggtacagcaacgataacgagtttgagccgcctctgactcaacgcagcgatttacgcttagagactttctggcgttttgaattgaatgaaaaattatctaagaaagttgaagctgacttaaaagcacctcaatgggacgaaatttcagactttatggaaactgagttatttcgaagtaagtatgcagcaggttttgaagaaccagaatttcagaaaaaatattttgatgggtcaacacatcaaatttcggtagagcatcaaccaactcttgctcttattcctgaaagctacccagcagattgtgcacatcaactcctctaccgcactcaggctttatcagattatttagagcagaaaaaacgcaccgcaaatgatcctttaggggaagacttagaccaagaacaaattattaacttaagaaactttacccacaaaactgacgacctatttgcaaaacttattgtgaaagcagcaaatcattatcaaacagctcaattaaaacctgttgagaaaccttctccttttgatacaacgaatgagtccgcaactcatttaaaagcacctcatcataaggctggaggaacaggggtaatcaagcttattgttctgacaataattatttgtgctttagcctattattttggtctttaatcaagattaaagttgccattcataaaatagttctgttattccaaggccgaactctggtagttcggcttcaccagttaatttggctcccattttttcatagaagaagcgacttggatttttattaaaaacttctaaacgaataaaagcataaccttgatttaaagcgcattgatagaacttttggaataacgcacgccctactccttttctttgaatttctcgtaataaataaaaagcacgaatttcagcaatattattttccggatttaaataaccatcgagaaagcctttcactactccattttcagtatagataaataacttatgatcaggacttctacttatctctttccataactgttgtttatctagtacgttaagctcattcaatatttcttgcttaatcatacctgtataggtttctttccaactctgtacatgtacttctgcaatagacaatgcatccttaaatgatgctatacgaatatctgtgtcatttaatggtttcaattcacttccctcatgtcactactttttagagtgaagcattaattcgtctcgtactaacctactcagttaaaagtaactctcgaacatgtattaaagcaaaacccaacaaatttagtccttgccatagagatggatcttgaatgtgtggatggtcttgcgccataccaacaccccaaattttatcgactggagatgcttcaaccaaaatacggtcttttgttgctaataagaatttttttaactccggatgctgtgagaatttagcaaaattcgcctgcaccactatgtcaaaacgtttttcttgccatatctgttcattataattacgtactttacggcctaattgcttcgcttcattcggatgtttaacctgcaaaatctgtgcaaaaatttctttatcattaaataattttgctttttgcgccatcatatagtgctcagcagtaaagtattcaataccttctacattaaattgcgcaggaaaccactggctaaaacagcttttatcaataagattagctttcttaggagtatgtccccagaaatataaatatttgaactggtgaccttgctgtattttttgaattaagtcatttagaaatttttcgtctttcatcatttatctctgattattttcttttttaaaatagaaccactaaaaataaaaaagaccgctaaaaagcggtctttttttgaatctctaagcttatgcagctaatgcgcctttagctttttcagctaaagcagcaaatgctactgcatcatgcatagcgatgtcagctaatacgcgacggtcgatgatcacttgagcttttttcaagccatcgatcatacggctgtaagacaaaccgttttgacgagcaccagcgttgatacgcgcaatccatagagcacggaattgacgtttcttctgacgacggtcacggtaagcgtattgaccagctttgattaccgcttggaacgctacgcggtaaacgcgtgaacgagcaccgtagtaacctttagcgcgagcaagaatttttttgtgacggcgatgagccactacaccacgttttacacgagccatttataatctccttagatgtatgggcacatacgacgaactgaagcaacgtcacttacgtgaaccattacacagccgcgcaattgacggatacgcttagcagattttttggtcaaaatgtggcgcttgaatgcttgtttgcgcttaaaaccgtttgcagtcgctttgaagcgtttagctgcaccacggcgagtttttaacttagccatagtaacctcttttgggcacctgttcggcacgattgcaccattgcaaaatcgacctgcaggtaaggaagcgcgtattttatagtatgctgactaaaattaaaactattcctagaatttttttaaattaatccctttagaaatgagaaaaacctatctcttttttagatgaatataatcggcaataatttcagcatcgctgcttatttacccctataatatgagcaaattatcaacatacgatatttcaaatgcagaaacatgatgcattcgctgccctgcgctatagagatttctcaattgtcaccattaatcaattttgcttaacattagcaattttgattcaagaaattattgttgcctattcactttatcaaattaccaaagaccctctaactttaggtttaattggactagcagaagccattccatttattgccctatcgctttggggtggttattttgctgataaatttaataaacaggtcatcatgaaaatctgtttatttttctcagtacctcttcctttagttttatggttactgttccatctgcatgggttgggtcatatcagtgtaaatttcctttcttggggcatttatgcggttatttttggtttgggcaccatacgtggtttttacaacccttctgctacatccctaaaaccatttttaattccacgtgagctttatgcaaatggtgcaacatggacaaccattggttggcagagtggtgtaattattgggcctatgctcggtgggttcatgctcgcttatttaggcagagaaaccagtctttttagtgttgccggtctacttactatctgctttattctcattaatttattacataaacgtagctttcctaaaattgaaactgccaatgttctagaaagcttaggcgatggctttcgctttatttggaaaaccaaaatagttctttgggcgatttctttagaccttgcctctgttttatttggtggtgtaatcgctctactccctatttttgccgaagatattttaaaagtcggtcctgaaggcttgggttacttgcgtgcagctccttctattggtgcgctcattactatgattgctttaactcgttttccgccaactcagcacgcatggcgtaatatgctacttgcagttgcagggtttggtgtatttacaatccttttcgcgttctcgaacaacatgtggttatcactatttgcgttggcgatgacgggtgcttgcgacagtatttcggtggtagttagacaaaccattttgcaaatattcccaccagaaaatatgcgtggtcgcgtagcggctgtaaatggaatgtttgtctcatcaagtaatgagctgggtgcatttgaatcaggcttggctgccaaatatttgggaactattgcagcgactatttttggtggttgtatgactcttgcagtagtaaccttctgttggctaaaaaccaatgatctttttaaagtcgatattactaaaagctcagaagattagttaaatcattttaataaagcatcttcggatgcttttattttaaataaaacctgtaattacccaataaatgaaaatataacgcccagccttagcgataaggaccataaataaaaagcgccaaaaattttctttgaataagccagcaaccaaagtaatagggtcaccaatcacaggtgtccaacttaaaagcagcgaataaaagccatatttatgataaaagcgttgggcttgttctaaacgtttttcagaaaccgggaaccattttttatgtttaaactgttctatttttaaacctaaccaccagtttatacatgagcccaatacatttccgaaagtagcaatcaaaatgagaagaaaagctgaatgttgattttttaataataaagcagcaagtacagcttctgattgtagcggtaataaggtagccgccccaaaagcactcaaaaaaagtaaaaagtaacttagcatattaaattagaccaaatcacctttcaccttattcattaccctaccaataaacttagatgactttaattgataatgctttttgtactgcagggcgtgctgttaagcgaacaatgtattcttgtacatacgggtaatcctctaattgaatcccctgccattcataacgcaaaatccaaggtagaattgccatatcagcaattgagtattcccctgcaacaaacttctgaccaatgagctgtttattcaacacaccatataaacgcttagtctcatttacatagcggtctatagcatagggaattttctctggcgcaaagcggttaaaatgatgattttgtcctaacataggacctaaaccacccatttgccacataagccattgttccacttcaactcgctcttgctcgtctttcgggtagaacaatccagtttttcgtcctaaatactgcaagatcgcgcctgattcaaatactgaaattggctcaccacgtggaccatcttggtcaacaatggcaggaattttattattcggagaaattttcaggaagtctggttgaaattgatcattttctaaaatattaattgggtaaagggtgtaatccagtcccatttcttctaaggcaattgtgattttatgtccattgggtgtgccccaataatatagatcaatcattctattttcctattcatcgttatcatgactgcgtcttgcgttatatcatgttttgggtaatacaatgatatttccaacaccaaaaaacacataaaaattgagaataactttggattaaaacgatattaaacgtcagtttaagaaaatagggctaaaagacgagaggcataaaaaagcactgcttttgcagtgctttttttgagtgttactttttctttttcggtccaagtaacatacccatttgtcgaccttccattttcggtgcttgctctacaacccctaactcagctacgtctgcttcaattttttgcaattgagctaaaccaagttgttggtgagccatttcacgaccacggaaacgtaaggtgatcttaactttgttgccttcttcaaggaacttcagaatagcacgaagcttaacttgataatcacctacatcagttgctgggcgtagtttgatttccttcacttgcacttgatgctgttttttcttggcatctttttgcttctgtttcaggtcaaacaagtgcttgttgtaatccatgattttacaaacaggcggctcagcgtttgcgacaatctcaacaaggtcaagatctgcatcctcagcagcacgcagtgcttcatttaatgaaacaattcctttttgctcaccatcagcaccgacaaggcgtacttcttttgcacggatctcatcgttaattgctggacggttactctttgcaccttgttgttggttacggtcaggctgtttaatctttcttactccacaatataccggccacgttcggcgacggcagatttcactaagtcaatgaaagcatccactgacatagtacctaaattttttcctgagcgagtacgtacattcactgtaccttcttcaacttctcgatcaccaagaactaacaggtaaggaatgcgctctagagtacgctcacgaatcttaaatccgattttttcatttctcaagtcagaaatagcacgaagaccattttccttgagttttgccacaacttgctcacttgcttcagcttgagaatcagtaatattcatgacacatgcttgtacaggtgatagccaaggcggcataaaaccagcgtagtgttcaattagtataccaataaaacgctcaaaactaccaagaattgcacggtgcaacatgacaggttgatcacgctcgttttcttcagttacataagaagcatctaaacgaactggcaagttgaagtcacactgaatggtaccacattgccatacacgaccaagacagtcttttaaagagaactcaatctttggaccatagaatgcgccttcacccggctgcaattcccattcaagaccagctgcatctaaagcatctgccaaagatttttcagctaaatcccaaagtgcatcatcccctacacgcttttctgggcgagtagataatttcatttgaacttcttcaaagccaaagtctttataaacatctaaagtgagtttaataaagtctgcaacttctttaccgatctgttctttagtacagaagatatgcgcatcatcttgagtaaaaccacgaacacgcataataccgtgtaaagaaccagatggctcattacggtgacaagaaccaaactcagctaaacgaattggtaaatcacggtaagactttaatccttggttaaacacttgaacgtgacaaggacagttcattggttttacagcatagttacgactttcagaatgagtcgtaaacatgttttctgcatagtttgccgcatgaccagatttctcccaaagcgtaaaatctacgatttgcggagttttgatttcttggtaaccattgtcttgctgaactttacgcatgtactgttctagtacttgataaatagtccagccatttgcatgccagaacaccatacccggtgcttcttcttgcatatggaataagtctaatgctttaccaattttacggtgatcacgcttttcagcttcttcaatacgcttgatgtaagctgctaactgttttttatcagcccaggcagtaccatagatacgttgaagctgttcattcttcgcatcaccacgccagtaagcaccagagattttagtaagcttgaatgattttaagaattttgtgttcggtacgtgcggaccacgacacatatctacatattcttggtggtagtacaagcccattgctttttcttcaggcatgtcttccacaagacgtaatttatattcttcgccgcggtcagtgaatactttgatgacttcatcacgcggtgtcatttttttgataacgtcataatcttgatcgatgagctttttcatacgctcttcaatcgctgccatatcatctagtgtaaaaggacgtggcatccagatatcgtaatagaaaccttcttcgatgaccggaccaatcaccatttttgcttcagggaaaagctgttttactgcgtgccctacaaggtgtgcacaagagtggcgaatgatctcaagaccttcttcatcttttggagtgataatttgtaaggtcgagtcttcggtaattaagtcacatgcatcaactaagcgatcatttactcgtccagcaacggtattttttgctaaaccaggcccaatactttgagcgacttccataacagatacagggtgatcaaaactcttttgatcgccatttggcaatgtgataattggcataaaaaaatccttaaggagtgatgccctatacgaaggagcatttcaccgcgagattatgatcgaggcaagcctcaaaatataaaaacggtgtaaatcaaaattaaaaaacctgaaagattttacacttgttcaagccaagtgaaaacctttgtactcataaaatcataaatacattttgcttatacggtaaacagcaataaatgactttaataaagacctagctaaattttcagaaatacataaataggataattattcatcagaactgatttaagatgttgaaaatagcatttctgctcattttctgactgggaggtatttctctttaagactaaagcattaatgctttgattactattaagccatattttcaaagaatgaattaaaaaatagaacacggagttgtttcacatggttagtgcctataacgaattaccacgcacacccgcaaactttgttgcgttatcccctttgcgctatttagagcgcgcagcttatatctacccagaccaagcttctattattcatggcaaccgtcagatttcatggaaacaaacttatcagcgctgccgtcaatttgcatctcagcttcaacaattaggcatagttaaaaatgatacggtttcagttttactgccaaatgtaccagcaatgattgaagcacattttgctgtaccaatggcgggtgctgttcttaataccctaaatacccgtttagacgctaaaaccatcgcttttatgctagagcatgctgaaactaaagtacttttagttgaccccgagtttgttaatttagcaagagaagctttatcgctcattcctaaccaacatattattgtgattgatgttgcggatgaagagtatgaaggcgaaaaccaattccttggttctttcgaatatgaggaatggttagctcaaggcgatgccaattttgaatggcaattacctgaagatgagtgggatgcaattagtttaaattatacctctggaaccactggaaatcctaaaggagtggtttatcaccaccgaggtgcatatttaaatgcagcaagcaatattttagcctgtggtatgaaaccccgtgctgtttatttatggacacttcctctttttcactgtaatggttggtgctttgcatggagtattgcagccagtggcggaaccaatatttgtctacgtaaagttgacccagaactggtgatgcagcttattgcaaaacataaggttgattacttctgtggcgctccaatcgtcctatctatgattattaatctgcctaaggaaaagcagccaagcatagaacatcatgttgaagttatggtggcaggtgctgctccacctgtcgctgtcattgaaggtatgcgaaatattgggattaatgtcaaccatgtgtatggtttaaccgaaacctatggaccatctgcgctttgtgcttctcaagcgggatggagcgacctctccattaccgagcaagcgcaactacactctcgtcagggtgtaccttatcctttacaagatagtatgcgggtgttagatcctgaaacgatgcagccagttccaaatgacggtgaaaccatgggagaaatcatgttccgtggcaatattgtcatgaaaggatatttaaaaaatccaaaggcaactgaggaagcttttgcaggtggctggttccacacgggtgacctagctgtttgccatccagatggttatgcaaaaattactgatcgctctaaagatattattatttcaggtggagaaaatatttcatctttagaagtcgaagacgttttatataaacacccagcagttttaacagccgctgttgtggcaaaacctgacgaacgttggcaagaagtaccatgtgcatttattgaattaaaaactggggctagtgtcacgcctgaagaaattattgagcattgtcaaaaagaacttgcgcgctttaaagttcctaaagatgtggtgattactgaaattccaaaaacctcaacaggtaaattgcaaaaattcatcttgcgtgaatgggcaaaagaacgcgcttaatctgaattctataaaaataaaaaagcggcgtatctaacgccgctttttattaaaaactgtattaaccttgatctgacaatagagcaacctgttgtacatagttaataaatttcattttagttgcttcaagatctgcttctgcaacttgctgggttttatcacgattaattcttaagacatgctggcgtaaagtatgtcgttctgatgcattatagattttgctaaactcattgattgcagggtcaccctgctcgatcatacgatctacccaacgcatgagttgagcttgtttcttcgcgccttgctgaggggtcaaataagataaaatgactgtctcatcttcattgcgcaagagtttaccaacacgctgaaactgacgacggcgcgcttcgaacgaactaatattctgaacttccaaaagagcatcaattaaacgctcatcaacaggaagtttttgaatttgtttgatagaaagttgtgctaactgctcacctaaagcagccatacgttgaactgcttttttctgttcggttttacttgcacgtccttctaaagaatcaaaatcttcttcagtataacgcttgggacgacgtgccacgattaatctgcctcataaaattttgcggcgaataacgcctgtacttcatttaatgcctgttcttcgtcagtgccatcaatgactaaacgtaaagtagtccctttacctgcacctaacatcagtaacgacataatattctttgcatctactaaatgatcgcccttaccaatttgaattgacgaacgaaactttgtagtgacctctatcagttttcctgatgcacgtgcatgtaaaccgagtttattaattacatcaacagttgtgtctatcatgaccagtgcttcatttctctgtgtaagacctgaacagaccattctgcctcaagtgcttgttttagtctatctaccatataaactgaacgatgctggccgcctgtgcaacctattgaaatcgtcatatagtgacgatgcccttcagcaaatgccggcagccatttttttaagaagtggagaatgtcctcaaacatttcatttgcttgtggacttgcttctaaaaattgtttaactggctcgtctaaaccagaaaagcggcgtaattctaaatcccaatgcggatttggtaaatgccgtacgtcaaaaacatagtcggcatctaaaggaatgccatgtttataaccaaatgactgcaatataacaattagattatctgattgtcctaattttgatagcaagatatgttttaaatcgtgaacacttttatctgtggtatcaatgtgaacagtggcacgaaactgaattggaatcagcaactgcttttcttcatgaatacactgtaaaaggcttttgaaacgatttgctaacggatgtggacgacgtgaagcactaaatcgtgcaatcaaatcttgatcttgtgtcgtcagataaatcacatcaaccgtaccatgtttttgtaattgctcaaaaacatggtcgaactcttgcatatctgcccgagtacttcgtacatccacccctaaagcaagctgctcaagattattttcatgatctagctttgccacgatctcaggcagcaatgccaaaggtaaattatcaatacagtagtagcccaaatcttctaatacttgaagagctgaagattttcctgaaccagactgtcctgtcacgataagtatacgcttcatggcatggctgtccttttatatattattgaggtgtaaaggcaacttgtagattatcaattaaacgcgttccacctaatttcgccgcgacaaacaacacgatatcacgatcaaattgagaagcagctaacaaattaggttggcgagcctccacataatccacaacaaaaccattgtctgtcaacagtgttttcaaatctgccaagacttgttgtaaatctttaccttggtgtaattgctcttcggcttgttttaaaccttgataaatgactggtgcaacctgacgctgttcaggagtcaagtaaccatttcttgaactcagtgccaaaccgtcttctgcacgaacaattggtacgccaataacttctaacggaatattcaaatcctgtacaaactggcgaatcactgctaattgctggtagtctttttgaccaaagaaagcataattcggttgcacaatattaaagagtttggtgacaaccagtgctacgccatcaaagtgccccggacgtgagcttccacataaatcatcagtaatttgactgacgctaatgttagttaagcgaggttgtgtaccgtacatttgttcaactgatggtgcaaaaataatgtcacagccaacatctgcaagtagacgactatcctgctctaacgtacgcggataattatcaaaatcttcacccggaccaaactgtgttgggttcacgaagatactcacaaccacaacatcacataactttttcgcttcacgaacaagagtgaggtggccttcatgtagatttcccatcgttgggacaaaaccaatgattttacgtgcagctctagcaggatttaaagaagcagctaagccttgtatagtggtttctgttttcatgaattacagctcaacttggaaagtgtgttctttagctgggaacgactgatcttgtacagcagcatgaaaagctttaaaagcatctaaaatcgctgtttcaccagattgttctttcataaagttacgtacaaaacgcgcaactcgaccaaacgttagacctaacatgtcttgtacaaccaatacctgaccatcagtcgcattacctgccccaataccgatcacaggagtatttgggaacaattcagcaatttcttgacctaattgtgccggaacgcattcgagtaataaaactgccgcgcccgcttcaaccaccgccgtacaatcggcaataagctgatcggctgcttcacgcgttctagcttgtaacttgtagccaccaaatacatgtacagactgaggagttaaacctaaatgtacacatacaggcacaccattacgtgttaacacttggacagtttcacttagccatgcaccaccttcgattttgatcatttgggcaccagcttgcataactgttttcgcattctgcaaagcatcgtttaaagtggcataactcataaatggtaagtcagtcataattaaagcatgctgattaccgcgacggactgccgctgtatgataggccatgtcttcaacagttacaggtaaagttgagtcacgcccctgaattgccattccaagagaatcaccaattaagatcgtatcaatttcagcaagttccattgcttttgccatacttgcatcgtaacaagttaggcaagagaacttacgtccttcggctttaaattttcttaagtcacttagactaatcatgatggtatcctctacaggagtttgcagaacgtaataagtccggctttaagcccaagactcatcagcaagtacagtcagcgttggctgttgtatgagttctaaatttttaagtggctgatcattaatatgtagatcagcatctaaatctaataaaggaatcacaacaaaatctcgttgtaatattcctacatgcggcaccgttaagcgctcattttgtattttttcattgccataaatcagtagatcaagatctaaagttcgctccccccaatgacggagtcttacccgcccagcttcctgctcaaaacgctgtaactggtcaagtaagtcaagcggaagtaactcggtttttagctgagcgactgcatttagataattcggctgatcttggggacccatagggggactttggtaaagtttagatactttcacttcaccaagagatttaagtttggctatcgcttcagacagaatctggcgtgagtcacctaggttacttcctaagccaatatatgtggttactgtcattgtgtcggcccaaaaataacttggctcaaatcacgttgtacccgcttgcgctttaaaattggatgatcactcatcacattcgtttgtgctgcggaagatttttcaataaaacggtcaatagactgctcttgtcgtgcacgttcttttttaccacgacggcttcgagactctggaacatcaaccaaaggctcaatttccgtatcaactttattgctttcaacaggctcagcagcaaccttacgacgacttttcgccttctgacgattatattggctaatcgcagcttctttttcgtcgtttgacatttcttggtaagcttcccaccagcttcccattccctgtgttgtgtcatcacctgacttttcacgaagtaataagaagtcaaacccagcgcggaaacgagcatggcttgccaatgcttcaatttgctgtggttttggattaagcaaacgggtttgcatttcccaaacttcacgaataaaagtttcggcaaaacgaggaataactgtgcgtgttgcttgacgttttaaaacatccaaacctgcttgagcacgtgcttcggccggaacaacgccttttgataaataaaaatcacaacgctctaaaaatggctgccacaataaaaccgcatagaaaaatgctggattaatcgttttacccacctgaatacgttgatcagtattttttgctgcacgttgaataaatggagtgagatccggacgaatatctgcaaaaagctgtttccacacaccaaagtcaatcaacattggtaacacgcgtgccaaatgccccattgtgaaaagcttttgagactcatcgtataaacggtgtggtgaaacatcccgaagtaattgcgtcatctcaacatcaaaaatgtcgagaattgccgaatcaattttaaagttgagcttagctgcaaaacgtaatgtccggagcatacgcaccggatcttcttcaaaacgttgcacaggatcgcccaataaacgtaaagtcttacttttgacatcatcaattgctttacagaaatcgagcacaatacccttacgcggctgatagtacagtgtattgatagaaaaatcgcgtcgagcaaagtcctgttcgatggttccccagttgttgtcacgtaaaatcatgcccgaagcactggtcaccgcttttttaggaggcgcacggaaagtggcaacttcgattagctcacgtcctgaatagacatgtgccaattcaaatcgacggccaacaattcggcatcgacgaccaaaaacttctttaatttgagaaggtgttgcattggtgactgcatcgaaatctttaggattgagtcctagcattaaatcacggacaccacccccaacaatataagcttcatagcctgctttagtcagactatcgatcacatctaaaatcgaagaaggaagttgggctgtggacaaaccacattttgacgctcgcaaggtttgcaaaagacgctgtctcctacgtcaggacgtaaataacaagttgtcgctaatcatagctctaacacacacaaagggcaatttgattctcttagattgcgcaggaaatgataattgacgaatagaacttttataaggctaaacgcgatttatttttttcaaaaatagctggtccaattcctttaacgtttttaatttcgtcaatatttttaaagctaccgttcttttgtctgtattctacaatcgcttgagcctttttctcacctacaccttttaattgctgaaactcatttacattcgcctgattcaaatgaatttgccctgtagagtcattaaaatttttagtttgagaaattttagaaccattagaatgagaagacttagtgatgtttaacttttggtcatacatctgctgtttagccttccattcttgaaagttttgatcaaaagattgagcgtaaaccgaaggtgaaattactcccaagcacaaaattattaaaacaaaatacttatttttccaaaatctcatgctgtattgcatgtggtttttcccctgattttaattgtcgttttgcctgattccacaattcatccatttcggacaaggtcatgtcttccaatgttctttgctgttttatggcttgctcttcaataaaagcaaaacgacttctaaatttatgtatggttgataaaagtgaactttcacttgaaatgccaagtttacgtcctacattgactaatgaaaacaggcagtctccaaattcatcttgaatttcattactattttgatttttaagtgcctgtttaaactcatctaattcttcttctaattttgtataagcatcttctaccgtttcaaaatcaaacccaacttttgcaacatttttttgaatttcctgcgcctgagatagtgctggtccatgtttaatttcatctaatcttgattgtggttttccttgcttttcttgttgtttaatttgttcccataactcacttacttgttctggtgttaagttgttaaattggtctgcttgaaaaacgtgcggatggcgtcgtactaatttttcgctaattgcctcaaccacatcttgaaaattgaacgccccctgctcgctaaacatttgcgattgaaataccacttgtaataacagatcacccaattcattccgaatttcattaatgtcaccttgacgaatggcagcctcgacttcatatgcctcttcaatcgcatatttagtcagtgacattggagtttgctcttggtcccacggacatttttcacgtagctcttgcataattttaagcaatttatccatgtaaccctcaagttcaaaaaattggtcagtaactttaaaatcttaatttgctatgatcaaaattaaagcggcaaatcattcgtcatattgtaacgataaagagaaaaaaagatgaaacatagcattctgattagtggcgcagctcaaggtattggagcagaaattgcacgggtattttatcagcggggttataaagtcggcatttatgacattaatgagtcgcttgctcaaaatttagcgcaggaattaggaccgaatgcatgcgcagggtatctagatgtcagtgactacagccagtggcaacatatattaaaagaatttaccgactgggctggcgagcttaatattttggtgaataatgcagggattttatattccggagcctttgaaaatatcgatatcaagtcacaccaaagaacaatcaatattaatgtaaacggcgtaatcaatggttgccatgctgcactcccttatttaaaacaagcttcttttgcacgagtcattaatctctcttcagcttctgcaatttacgggcaagctgacctcatttcttattcggccagtaaatttgcagtgagaggaattaccgaaggtttagatgtggaatggaaaaaatacggtattcgtgttttagatgtgatgcctttatttgtacaaaccgcaatggtcaacaatatggatgcaggttctattcaaaacatgggagtcgatttaacgcctaatgatattgctcaacaggtgctttcacttgtagagaaaaaagctcatttctggacacctactcacactccagttggtataaaaaccaaattgctttatcaactctcaacaataagcccccagtttttaaatcgtttaacgaatatttatctatcaagaaagtagcttataaaaaaggccgtcaattgacggcctttttctcaatttagttaaacaccttgaatcatgcgtcgtgcgctaataatccccggttgttgctctaaacgagctaacaaacgtgaaagctgagccaagcctttcacctcaatgagcaacttcatattagcaataccatctgcctcagaaattgtgttcacctgacggatattaatctggtcagaaaaaatcacttgagttaagtctttgagtaagccacgacgatcataagcctcaactacaatttgaacactttgaccacgagttggctgcatttcccaatcggcttcaacagcacgttctggctcttgcttgatcatacgttgataatcagaacataagactttatgaatacttaccccacggttcaacgtgatataaccggcaattgattcaccatgaactggttggcaacactgcgcaatatgtagctcaacattgtctaaaccatcaattaagatgccatgcgcagacagagtatgactagcacgtgggtttaatgttggtttaagtaccagttcaggttcatcctgatccagatgcatttgacgattaatctgattaatcagagcatgcaaactaatatcgccgctgaccagactaaccaaaatatcatcccctgttttcacattaaaatgtgacgagtaatcgttgagatcgatactcttagggtgaatcgccaatcgagacaattctttgtttagtaactcacggccaacttcaaggttcttactacggtcttgctgtctgaaccaatgacgtaatttgtcacgggcacgagctgtcttgatataacctaaagagttcaccaaccagtcacggttaggctcacgatccttcttggttaaaatctcaacctgctcacctgtttttaacgtataggttaatggtacatagcgctggttaacacgtgctgcataacacttgtttcctacctctgtatgcacatgataagcaaagtctaaaactgttgagccacgtggtagttctttaatatcaccatcacgactaaagacataaatcttttcaaaaccttcaaagtcttgaagctgatcaaaaccttccgtctcatcttcattttgatgtactgttgtttcattacgttcttggtaatgttccaaaacagcacgaagcgaatgcaaacgatggttaaaagagtggtcggtattctttgaaccttctttatagttaaagtgcgaacatacccctaactctgcttcgtcatgcatctcatgagtacggatttgtacctctaaggatttattctcagcaataacagcagtatgtaatgagcgataaccattggctttcgggttagtaatatagtcatcgaactgatgtgggatatgacgccaaatctgatgaacaatacctaatgagtgataacactcaggtacgctattcaccaatacacgtaaagcacgaatatcataaagctgatcgaaacttaggtttttgcttttcatctttcgataaatcgaataaatgtgttttgctcgacctgtaatttcagcttcaataccatgcgccgccaattcactttttaaacggtctatcacgaactggatataatgttcacgctcaagacgtttttcattgagtaatgaagcaatctctttataacggtctggcgccaaataacgaaacgctaagtcttcaagttcccacttcagctgtgcaataccaaggcgatgcgctaatggcgaataaatagttaaaatttcacgtgccacacgctcttgacgttcacgagatgagtttgccaactcacgtaaagagtaagtacgttcagctaacttaattaaaacgacacgaacatcttcggtcactgaaatcagcattttataaatgccgcttaaatgttcccgttggttgttattaaaatggtcttctagtcgtttatttttttcaataagctctgaaagcttacccattgccaaagtacctttgacaaggttataaacttgctcaccaaactttcgctttacttcttctatatcagtaatgtcctcacgaacactacgataaagcattgcagcagataaagtatcttcatctacatgtaaatgcgccagaatatcagccattccaacaccagtagcaaatgtattggaacgatgattaaccgttgaatctaactctttttgtagggttaaatgcgcaacctcttcgagttgtttaagctctgccccatctaatatttcacgaacccgatccaaccatgaggctaaaccgacttgtgtttcggcggcatgctctacagtcgtttcctctgacaactcagttagttgttcaggtaactgttcacgtactgtgaccataccattctcctggatatgtaactcatgtttttaatcgtttatctcttgaattttctcaaataaagcaatcgattcaacatgttctgtgtgcgtaaacatgtccataaccgctgctttttttaactggtaaccatgttgaaccaaaacacctgcatcccttgctaatgttgctggattacatgatacataaacgattctttttgctccaaagttcggtacatactgcataatttcatatgcaccagcacgaggaggatcaatcaataatgcatcaaatccttgatttgcccaagaatgatgcgaaaaatcttttgttaaatcttgtgaaaagaagcttgcctgcaccagattattacgctttgcattatctgttgcccgctgcaccatttcttcacttgcttccacacctacaacctgaccctttgcaccaacacatcgtgcaagtggaagcgaaaaattacctaacccacaaaacagatctagtactctttcaccctgttgcaattgaagcaattcacatgccaattgcaccatttgttcatttactgtggcattgacctgcgtaaaatccaatggcgaaaaagcaaaatttacatcaaatgcatttaaagcataatgtaatcgcatagctccttgttcttcatcaatacgacgaagactttcgggtcctttaggttgcaaatacaactgccagcctttgtgtaacgcaaattgtcttaattggttgacatcagcattgtttagtttttcgatatgacgaactaataaagatgtttcataatcaccttttgctaattctacatgaccaatatgcgctttgccttttagactttggagtaaattacgcaattccggcagactatctgataactttttatccaaaacgctacaagtatggatagatgttaaacgattactatgatgctcacgaaaacctagaatcaaacggtcctgttttggcaaatagcgcacacctattcgagcacgacggcgataatcactttgcaaagaacgaattggttctaaccattgttcaggctgaataccagcaaagtgttgcaagtgtgactgaaggacattttgctttaaacagatctgctcatcagggtggatgtgctgcatgctacacccaccgcaaataccataatgaggacaaactgcctctacacgatttgctgaaggttctgctaaaagcgctaccatttcagcttcttcaagtcgcttagcctcatgcgtaatttgggcttttactgtttctccaggcaacgcataacgaataaacacttttttaccatgcttatctgccggatggtctggatgagaaccataatgcgcaattccccgcccctcatgagaaagagtttcaacctgaaaaatatattcgggttgttgaggtttacgagatttggcttgctgtttcaaagaatgaacctaaaaatttaaaggattaaaatagtgggacgtaaattcggtatgcttcgaagtacgttgccacacctcaagaaaatcggcttgctgaggcatagtctgtaaatactcaatactcgaactaatccagtggttatgctcatctatattcatttggcctttgagcaatagccaacgcaaataaataaaccatgtattgagcacatcaccttcacaataactggttaactttaaccattgttctgtacgtacgtattcaggcacatgataacccgactcaccacgtttacctggtaaacctaaaatacaggctacatcatcgagtttctgaaaattacggccattaaacattgccataacatccattaaatcaatatgacggtggtgataacggttttggtaattattaaaacgcttctgactatcaagctcgccttgatcaaataacccgggtgccgaaagaccatgatacatggcacggaataaaatgacgggcaaatcaaattgcgaaccattccagctcactaaagttggatgacgcttatcaaaaatggatagaaacttctgtaaaatttcagcttccgaatagtgttcccgactaaaagaaaataatctgaaacctgattcatcaatccacaaaccagaaatacaaacgatttcatgtaaaggcaaacgctgaaaatccatgccggattcttggcgacggatttttgtgagtgcctgttcaacatctgcctctggcaaatcaagatgatataaatgcgctcccgcttttaaatcagttaaagtttcaatatcaaaaactaaagtaggaaaacgcattttttctctcaattatgagtcatcagtcctgtactgaaaacaggcctgtagacaagtagcgatcaccacggtcacagataatgcaaacaatcacagcatccggattttcttctgcaatttttactgaagcccataccgcccccccagaagatgtacctgcactaattccttcttcacgtgctaaacggcgagccgttttttccgcttcaatttgcggaatatccataatttgatcaacacgctttggttcgaaaatcgtaggtaaatattcttgtggccaacggcgaataccggcaatatttgaaccttcagaaggttgtaaaccaataatttgaatatctggattttgttcttttaaatacttagaaacacccataatggtaccggttgtacccattgaacttacaaagtgggtaatctttccacctgtttgtttccaaatttcagggccagtcgtaaggtaatgagcttcgacattatctggattgccaaactgattgaggaccaaacctagaccttcagcttgcatttgcaaagccatatctcgtgcagcttccatattcggtgcttcaatcaattctgcgccataagcacgcatggcgtccttacgctcctgacttgaattcccaggcataatcagtttcattttatagccgcgcatcgccgcaaccatagctaaagcaataccggtattaccactggtagcttcaactaatgtatcacctggtttaatttgaccacgcttttcagcctgcataatcatgttatatgcaggacgatcttttacagaacctgctggattattaccttccaattttgctaaaaccgttgcctgcgtatgacaagccaagcgctgcaaacggaccagaggtgttttacctacatagtgatctaacaaaaattcgtcggctaaaaaatcaggttgtgtattactcatgatcaacacctaaatcggggtggcactattgtatgaaaaaatgatcggtactgcatccatttcactatgctttttaatgaaagtgattaaagcccagtcagttataaaatgccgtctgttttaaaataaagcgtgataatatgccctacagagagatcaatctgatgtagctatgtctaatttcaataaaaccttatcgaaacgcttacgtctgaatcatgcatatgggcaattaattgctcttatttttgtgcccattatgattttaacgtgtgttggggcttttctggttttaactgaaacatcacgttctgcaaagcaacaacaattgcatcatgcctcagcgattttggcacgctacaatcaaattgctaaagatctctacacattagtagaactacaaccagacgaatatgatcatgctcaacatattatgcaaagtatgtttagcgagaaaaatctaaagcgtgctgctttaattgatagtaatggtcagacttatttaagtatcggttatcgagataatcgttactggcctaacttcacacaaaacaataacttttttggtccgatctcttataaccataataatatttatggagtccgtatcattgataccgcaggaaagcctcctgtctggctcttgattgaaatggataatcaaccacttgaattagcgcgttatcgcattttgattgctttggtcattaccggtctgatgactttattattacttttgctctgtcttaacttttattctcgccgctggattgcacccatgtatgaaatacgtatgcaattacagcgtctcaatgcagacactttagaccaacacatcgtgattaacagttccggtgagttaagattactccagcgcgatatcgcaaacgtggtgaaacgcttacattttagttttttagagttaaaagaacataccgagcaaacagaagaagacttacgcagaactttagatactttagaagttcaaaacattacttaccgtcaagcacgcgaccaagccatttcatctaatcaggcaaaatcggttttccttgccaatatcagtcatgaacttcgtacaccgcttaatagtattgatggctttattcatttattacttcgccaacaaaatttaagtaacgaacagaacctttatttacaaactattcgcaagtcctccgcccatttattagcattaattaatgatgtattagatttctcaaaaattgatgcaggtaaactggaacttgaaacagcaccttttgacttagaagaagctgtatttgatgtcatggatatgttgtcacctttggctgcacaaaagcatattgccatggctttttattatgcagacaacattcctcaacaagtgattggtgatgctttacgctttaagcaaattttgaccaatttgatttccaatgccatcaagttcacgccagacggtgaaattattgttcgtgtacgtatggaacatgatgacatcggtcagtgcttgcttcattttagtgttcaggacagtggtattggtttaagtggtacagaccgtaaaaaattatttgagtcgttttcgcaaggcgatgcatctgttacccgccaatttggtggtacaggcttaggtctggcaatttctaaacaattggttcatctcatgcatggccaaattggctttgaagataaccaagaacgtgctccaacagaaaaaggttcaacattctggtttactgcacagtttgctgtagatgaagaacatgagattgaacatcctcacttcgaacatttacaagtggtgtcttatttagctcaccctgcaacagccagtgttttgcgctactatcttgaaaattatcaagtaccacatatcgaaactcaatcgattctggacttgtttagccgcttaaaacatctcgaccaaaaagacaatacatggctcattgttgatcatagtggtgatactgaagctctactcaaagaaattcgtagccgctatcaaggtaacttagcagtttacggctatcaaatgacgcttgagccaaacatgctcaccgaatatcgcgctcgcccactttatcaaccattaagccgcagtggcctcattcaattattaagtgaccaacctatctttgaagaggaacaacaagactttaatggacagggtttacatattttggcggtcgatgaccatttacctaacttaattgttttagaagcattattaggtgagttaaatgtcaaaaccactaaggctttaagtggacaagaagcgctgaatattattcaagaaagaattgatcagaagcttaaaccatttgatttggtatttatggacattcaaatgccggttatgtcgggcattgataccacacgtgcgatccgatctttagaatccactttagatggggaaatgcaacttccaattattgctctaacagcccacgcgcttgcagatgaaaagcaaaagcttcttaaagttggtatgaatgactatgtcaccaaaccaattcaaatggagcagatcattcaaattttaacgcaatggacgaaaaacaacttcactgcgcaaaatctagctaaagatcatcatgtggttgcagaagcgttagatccagaaattttaaattggcagcaaagtttacaactggcagcaaacaaagaagatttagctcaagatcttctcaaaatgttggtagatagcttcccaaccgagctagaagaaatgcaacaactcattgagcttgaagactttcctcagcttgagcatgtactacaccgtctctatggcgcaacacgctatgtaggcacaccaaaacttcaacaagtgacgggtgactttgaacaatttatttctacgctacgcaaagaacgccgtagagctgacgatggcttcattgaagaagtcatgagacgtttcgatgaattaggtctcgtcattaaagaagttgagagtgcagctcatcaaattttagtcataccagattaaataatagttgttaaataggcatgactgacctgtcatgtttccaatttccagccatgctatgctccgcttatcgataaaaaaataagcgggaatttcatggcacttttacgtattgaaaaaaataatggcattgcaacagtttatctaaaccgtcctgataaacgtaacgctatgagttttgctctactcaaagaactcgtaacaacggctaaagctatacaaaaagaccgagatatccgctgtgtaattttgacgggtgaagcacaagtgtttagtgctggtattgatttatctgacttaaacaatcctaagaactctgcatttgctatttgggaacttgttaaaccagggcaaagccttttccaaaaagcctttcttatttggcaaaatttgcccgtccctgttattgccgctcttgaaggttattgttttggggcaggtatgcaacttgcactagctgccgatatccgcattgcccacccagacattaaaatgtcgattatggaaagccgctggggcttagtaccagatatgggtcttacccgttcgctcaaaggcttgattggagttgaccttgcaaaagagctgactttaactgcccgtgtttttgacggaaattatgcaaaagatattggacttgtgactcacttaagtgagaatccattagaaaaagcaaatgcgatcgcttcagaaatgttgcagcgctcacctgatgcattgactgctgcaaaacgtgtactagatgcaatggaacatcaaccagaaaaatcattacgcttagaaaaaatctggcaacttaaattattacttggtaaaaatagcaaacttgctcgtaaaaaagacaaacatccggaagttaaatttttaccacgccaatatagataagagctttattatgaattttgatcgtaatactcctattgcttttttaggcataggacttatgggaagccgtatggcaagccgtcttatacaagccggctttcaggtcgcagtatggaatcgaacagcatctgcttgtgaagaacttattgatattggcgcgcatgcactcgatctttccaacatcggacagtaccctctcattttgacttgcttagccgacgataaagctgtgcaagcagtatttgatcaaattcaaacaaacttaaaagcgggtcaggtcattgtcgacttctcaagtctctctgttgctgcgacaaaagcacttgctcaggctgctgcttcacaagatgtgatatggattgactcccctgtttcaggaggtacagctggggcagaacaaggcacgctagtcatttttgcaggtggcgatgctcaaactattgaagctttaagtcctgtttataatgttctttcccaacgtgtcacaagaatgggagatacaggcacaggacaagcaactaaaatttgcaatcaactcattgtggcagcaaacagcgccctgattgccgaagcagttgcactggcagatcgggcgggcgtagataccactttactcgctcctgccctagctggcggatttgccgactcaaaaccttttcaaatactggcaccacgtatggcgactcatactttcgaacctgttcagtggaaagttcaaacattatcgaaagaccttaacaacgcagtaacattggctaacaatgttaatttagacatccccgttgcacaaaaagctctattacagctacaaactcaccaaaaaaatggctttgctgagaaagatttagctactatgattcaagtagtagagcaataataaacggagtttgtgtatgggtcgtcttgccgttaacttatccatgatttttaccgaagttcctttaattgaacgctttgcattagcccatgcagagggctttgaacatgtagaaattcaattcccatacgagcttgccatttctgatattcaagaccaacttgaacgttacaacctaaatttatgtttaattaacgttcctgctggtgaccttatgcaaggtggaaatggcttagcaggtataccgggtcaagaggctgcatttcgtgaggcattacagttagcgattcgctatgccacagcattaaaagtacctcgtgttaatattttggcaggtaagcaacctcaagactctgacttactcccttgccttaagacacttgcaagcaacttaaaattagcctgtgatttactgacagaacacgatattgaacctgtatttgaaatgattaatggcacagatatgccacgctttttggtacagaacattgcccaagcccaagaaatgctagaagcagtcaatcaccctgccttaaaaatgcaatatgactgttaccatatggcaatgatgggtgaagatgtacttgaagggttacaagaaaatattcaccagattggccatattcagtttgcagattgtccgggacgccatgaacccgatacagctcaaataccgtatgagcaaattttttcatggattaagcaaagtgcttatgagggctatattgcggcagaatataaacctaaaaatggctcaaatcagtcatttacatggaaaaagaaatatttttccgatgatgtaaatatataaactgttactagttttgtttgaaattctgagtgaaaaccactatattagatagtgagtaattgtcaggaaaatataccctatatgaatttagaaccatcgcccagcgtgtctaattctcacgatttcgcaatgaacacctcaaataaagacgtacaagcttgtcttaaagtcgtccatgacgctttagttgatgtaaaagcaaaagatattctacagttagatgttagttctattagcaatgttgctgatgctattgtcatcgcgagtggtacttctactcgtcacgtcaaagcacttgctgacaatgttgcagaagaagctcgaaaagctggtttccgcccgattggcgttgaaggcgaacgagatgccgaatggatcttaatcgatcttggctttgttgtagtacatgtgatgctaccaactgcccgcaaattctatgatttagaaagcttatggcgtactgctccagagtcggtcgcataaaattttgcttttaaaaaaagcggctcttttgagccgctttttgtttatatacttactcaaacttttattatttaaacagccacctttaccctcacttcctatgaaaagctgttaactcaacaaaactttaataacactaacaagcaagtcatcactcttatttaaaattgacatgacaaattgtcagaattccagcactataccaattcttatagtctcatcaataaatagcataaccggagcactaaaaagtgaagatactcattacaggcgccaacacaggtattggttttgccacagcagaacaacttgtaaaacaaggacaacatgtcattttggcatgccgaaatcctcaaaaagcacaagaggcacaaaacaaactacgctcactcgaccaaggacaagtcgatgtcgtttctcttgatttaaacagccttgaattaactcaaaaagctgccgaagaaattgcagataaatatggcagccttgatgtacttattaataatgccggtctattttcaaaaacaaagcaactcacggtagatgggtttgaacagcaatttggcgttaactatttaggtcactttttattaactcaaaaactactccccgttttaaagcagtctcctcaagcacgtattattcatctagcgtctattgcacactgggttggttcaattaagcctaataaatttcgtgcggaaggtttttacaatcccctgttctattatggacaatccaagcttgcaaacttactgttcagcaatgcattagctgaacaactagcagacaattcaattaccaataatgcattacaccctggtggtgttgcttccgatatttatcgtgatttaccaaaacccgtttatgcagccatgaaagtaggtttagttccaacatcggttcctgcaaagctcattacagaaatggcgactggtgacacatggcaaaaccgcaatggtgaatatgtcagtgcgcatatgcctgactggaaatcctctcatgccaaaaaccagcaattagcacgcgatctctatcagcaatctatgactctagtggaaaagttcctctaaccctcaaaaaataaaaaaccacccgaaggtggtttttttatatcaaagcaacttagtggcctgtaccattaattgctttcgtcatatcttcaacaactttcttagcatcaccaaagatcatcattgttttttcgttatagaacaagtcattatcaagtccagcataacctgtcgccatagaacgcttaatcaccatgattgtacgtgctttatgtgcttcaagaatcggcataccataaattggtgaacctgggtcatcttttgcagcagggttcacaacgtcgtttgcaccaataacaagtactacgtcagttgctgggaagtctgagttaatctcatccatttccaagatgtcttcatatgctacgtctgcttcagcaagcaatacgttcatgtgaccaggcatacgacctgcaaccgggtgaattgcgaaacggacgcgaacaccttgctcttttagaatttcgcataactcttttacagcattttgtgcacgaccttgcgccataccataacccggtacaatcacaacgctgtctgcatttgacattaagaagccagcatcatcagcagaacctgaacggtagttacgctgaacctgttcacctttagcagctgtagaaactgccgcaccacccattgcaccaccaaacaatacgttgatgattgaacggttcattgctttacacatgatgtatgacagaatcgcaccagatgaacctacaagtgaacccgcaacgatcaacatgttgttttcaagggtaaaaccaatacctgctgctgcccaaccagagaacgagttaagaagcgataccaccacaggcatatcaccaccacctaccggtgcaatccatacccagccaaatgcaagtgcaagtgcggtcattgcccagaaagcagtcatgttgccagttgtgaagaagtagaaaccacaagccaacatcgcaacaaagataagtgcttgaacaggtttaacccatgcaccagagattgttttagcccattttttcgcagccaatttaccgtaagcaaacacagatgctgtaaaggtaatcgcaccaacgaaacaaccaacaaacaattcaaataggtgaaccttactcatgtgtgcatgttgcacgccagccgctgttaatgctgcctcattttgagcaaacaatgctgtaagctggttgttatgcaaaattgctgcaactgcaatcaaaaccgcagccaaacccaccaatgagtgcataagagcaacagtttcaggcatttgagtcatgggtacagtacgtgcacgtgcaatacccacaatcgcaccaagcaccattgcaccaccaatcatccagatcactgggttgttggcaacaaagaaagttgtcacaactgcaatcgccatcgcgatcataccgtaacggttaccttgaattgctgttttaggaccagacaagccacgaagcgtcaagataaagaggattgcgcctacaaggtataaccagtttgcatttgcttgaataaattccatgtcaaagccctcttatttcttttgcttaggcttgaacatttccaacatgcgtgcagttactgcaaagccgccgaaaatattaatgcttgctaaaaataccgcaatggcacccagtacactcaccacattcacactttgaaatgcaacgttagcatccacacctaaaactggcagacctacagtttgcaacatcgcaccaacaacaataatcgatgacaatgcgttggttaccgccataagtggcgtgtgcaaagctggtgtaacaccccaaacaacgtaataacctacgaagatggcaaggacgaaaattgtaatagtttcaaccatgagaaatctccttaaccacgcttaagcagcacttgaccgccatgagtgaccaatagggctttttggatttcgtcttcttgattaatcgcaaagtttttctctttgtcgaataaagtctctacgaaattaaaaacgttacgtgcatataatgcagaagcttctgtcgcaacagtggccggaatatttggaatacccaaaatttttacgccattttcagtgacaacagtttcgccaactttagaaccttcaacgttaccgcctgtttcaactgccatatctaaaatgacagagcctggtttcattttggcaacagtttcagctttgatcagacgcggtgcatcacgacctggcaacaatgctgttgtaatcacgatatcggcattcgacacagccttatctacaatcgcagcttggtctttgatgtattgctcacccggcatccagccataaccattttttgctgcatctgctgcacgttgctgttcttcttcagacattggtacgtctaaccacttaccacctaaagactcaacctgatcttttgctgttggacgcaaatcagttgcttcaacaattgcacccaaacgttttgcagtagcaatcgcttgaaggcctgcaaccccaacacccataatcacaacacgtgcaggctttacagtaccagcagcagtcataagcattgggaacatgcgttgatattcagcagccgcaagcaaaactgatttataaccagctaagtttgcttgagaagacaacacatccatgttttgtgcacgagaaagcgtacgaggaagcaattccagagcaaaagcagacacttgctgattcgcaaattggtctagctcggtattacgataaggatcaaacattgctacaacagttgtatttgctgcaagtttttgaatttccccgccttgtggcgcacgaactttcaaaataatttgactacccgtataggcatcatccgtaatggttgcaccgacctgttcataagcactgtcaatgtacgcagcctttacaccagcaccacgttcaatcacaacgctatgaccagcgctaatcaacttctttactgtctctggcgtagcagctacacgattttcaccgacgacagtttcggttgggattccgatctgcatgagcgttcctcaagctaatttctcattgtcaaaaacattgcaacccgcaatgtttcccccatgtgtattctttgtacagaatttggattctaattgaactttttgaaaataccacccactatttatttaataaatacccatattttgaactgatgattcacgatatttgacttgaggtgtaatataggaagatttttcttttttttgcagacaatagtctctcttatacagtcctgtatatgaaaatttctttatcttcgtttcaaattgggtctttttttgcgctttgctctgcttttctattcagcacaaaagcgattttcattaaacaaacttatgccctttctccattagtagacggtacagtcctgatggctttacggatgttaagcgctttaccgttttttctattaatttgctggttcaataggcatcataatcagggcataaaaaagaaggattggctaattttaatttttgccggtctgttaggctactactttgccagctggctcgatttcatgggcctcatgtttattagcgcttctttagagcgaatcatcctatttttatatcccacacttaccgtgatcgcttcaagtctgctctacaaacaaaaattagatgtaaaaagtttattcgccatttttcttagttatggtggaaccgtgttagtgatgctgcaagagcacaacaatgcaccaattcagggcaacttttggctcggaacaagttttgtatttgctagcgctgtagcttttgccggttatttactgctgactccaccattaattaaaaaatttggttcttggaatttcacaggcttagctttaacagttgcctgtataggtacattaacccattacactttaagtacccctcacccgtttcaactcctattacaacttccctcaagtgtaatttggtacgggattggcttaggttttttagtcactgtcttacctaccgttatgcttatgcaaagcattgagcgtctcggagcatctcaatctgcaatgattgcttcgatcggaccagttttaacgattttgcttgccgttgcttttttaaatgaacacctaaatatatggcaatgggtcggttgtttcctcaatatagtcggtgtaatgatgattactttaagaaagaaaagactaaaacactaaatgctcttgacctcaacttaagttgaggttggatactcatctaaattttattaaacggttgagttccatgaacaaagaaatttttaaaatcataaatccttctactttatatgacccaacacctaacgcttacagtcatatcgctgtagtaagtaattttaacaatattattcatattgcaggtcaaggtggcgaagaccaacaaggtcaattaagttctcatttcagtgaacaagtcctacaagcatttgaaaatattaaatatgcgttagtagctgccaatgcagaacttacggatatcgctgttttaagaattctagttgttgaccattcggtagaaaaacatgagattttgattaaaattatgaaggatttatggaaaaatcatccttttccagcctgcacactcattcctgtgccgcgtcttgcactagaacatatgctcattgaagtcgaagcaacggcatacacttaataaaatcgagagaacatcatgtctacccctgaagatatcagtcaaaataaacctttactttggttgatggcagcagcatgtggcctatgtgcaggtgtgaattactattgccaacccctaattcactctattcagcaagattttgctgtaactcaagcacaagctgctttaacagtaacatttgctcaggtgtcttatgccttaggtttactctttattgtgccaatgggggatatcgtcaataaagccaaagctattccgtttttaatgatgctttgtgcagttggcctatttacctctgcttttgctgttaacttacctatgctctggatcggtacaattttagcgggtttgttttcagttgcagctcaagtgcttattcctcttgcaacaatgacggttaaacctgaaaaaactggtgagattattggttttttaatgagtggcttattggtcgggattttactctctaccagtctggctggcttattttccaaccttttccactggaaagtcgtttatgccataagtggtatattaatgcttctgttggcctataccttaaaaagccgcctaccttatgtcatgcgtatgaaactgaactatggacaaatctttgtttccatggctcagcttttaaagcaggaaaagcgacttttattaagagcgcttacaggtgcattcgcctttgcgtcagtgagtattttgtattcaacaatcgcgttactactgacctcggcacatcatttacccgatctatttattggactggtacctttagtcggtatctttggtgcgttatcaacacgttatatcggcaaatatgccgaccaaggctacacacgtttactcacttggatgggttgcgggctatttttggtaagctggatttgtttctatttcggacaaactctactttcagcttatgttattggttttgctttaattcaattggcacttgcccttgttcacaccagcaaccaaagtattatcttccgtttacgtcccgatgctaaatctcgtattaatgctatttatatgactacttattttattggtggtgcagccggttcagcattagggatttttgcatggaatcgtggtggatggaccatgacttgcctagcaggtgtgggactcgttgtattttgtattttatttagcatgattgatgctttcttacaaaaaaagcaaatggcttagctataaggtaatttgttaaaaatcatctttctatatttaacataagggcggttataaattacgcagttaaatgccactgtcgattcaggactaaaccccgtataatgctgccctttctttaatttagcgacttttgggtctatcggttatgcaatcacttcaatcgttacaacctcgtatttcagtagccccaatgatggactggactacaaaggactaccgattctttgcacggttgtttaacccaaacgttgtgctttatacagaaatggtgactacgggcgcgattctatttggcgatgcgaaacgccatttgggctataacgctcaagaacacccaatcgtattgcagcttggcggctcaaacccacaagaacttgccacttgcacaaaaatggctgaagactggggttatgacgaagtcaacttgaatgtaggctgcccaagtgaccgtgtacagaacaataaaatcggtgcatgtttaatggcagagccagacttggtcgctgaatgtattcacagcatgcaaaaagtggtgaatattccggtaacggttaagcaccgtatcggtattgatgacatgcagtcttacgaagaaatgctgcactttgtagatactgtagcagcaacaggttgtactcactttgttgtacatgcccgtattgcgatattgaaaggtttgtctccaaaagaaaaccgagaagtaccaccgctacgctatgaagatgtttaccgtttaaagcaagaacgcccgcatctgactattgaaattaatggtggtattaaaacttttgccgaaactcaagctcatttacagcacgttgacggcgtcatgattggccgtgaagcctatcacaacccttacttacttgctgagctcggccaactttggaacctagaagcaccagatcgtttcgatattatggaacaaatgctaccgtatattgaacaacgtctagctgaaggtgcacccctctctatcattacacgtcatattttaggtctattccaaaatttaccgggcgctcgcaaatggcgacaagctctaagtggtggaaatgcaaaaactttaactgacgtcgagaatgcaattcataatatgcaagctgctattatccgtactgaagagtatttaaaggaacaccaattttaagccagcccatgtttctaaaattgtaagaaaatgtggcattttaaatcagagacttagattttgagtatattcgcaaatgttggctcgaaatattcaaaattaagctctgattaattatttatattcaataatatcaaaaacttaatttgtataatttcaaaagctcttttaattagcccttttttccatagccagaaataaaaactggcaaaaagatacgttattacataacataaacaaaacttttaagtttgggccattagtatctctgaacgccacaggtaggtggtgattttctaaatacggatataggtagtacgggtagagatttcacgatgattatttatgacggacaagtagctgataactatatgtatcaggattcaaatcaggcagccattgttgtatcccacagcacaccaagcctcccttatccattcaccatgaaacccaataatcactccactgaaaccaacactcctccagccattgatgtagaaaaattcgtagctaaattagaaagtattacctctagacgcagtaaagcgcgttgtgcacgtagcatccgtattgcgcttgagtctgctggtgccgatgttgaaaatcatccgattgcagcatctgattggggcgataccctcaagaaaattggctataaagaaataaatccagcctttgatgagccacaagaaggcgacatttatatcattcacagaacccgcaaccatatttacggtcatatcgctggttacacaggaagcgaatgggtgtcggactttaaacaaagtagttatgacgtctataaagatgataacgtcacctatacttactatagattaggctaattcacttctaagatagaaacatttgatgaatttgctcggcgcagtgctgaatgatttcatcatggccttttctatagaccagtaaaacttccgaaagagatagggaatcttccaaaggtattagttttacattggcaggtaagatttgttgaaactccgcaggaacaatacctacccctaaatttgccgccacgagctgtaactgtgaaatcttacgcgactgaatggaggctttttgtggggtaaatcctgcggctaaacacagatttgcgaccaaataacttaagcctcctctttcggcatgaggtgttgatacaaaacactcatcttttaagtcttttaaataaaccttttctgatttagcaaacttggcatgatcaatatgcacagccaccattaaaggctcttcatataacttaagagtatttataccatctaaagtatgccgaactggtgggcggatcaaaccgatatcaatttcaccatttaataacgctaagatttgctgctcggatgataaggtattaatctcaaagctcaactgctgcgttaggctaacttcttttaatatctgaacctttgtattatccacgacaatactgctggaatgagcaattttaatctgtcgatttttcccttccgaaacacttttagacaggtcaataatttcatttaaataaagcaagttatcttttattttcttatagaagacctctcccgctggcgtgagtcttgctcttttgtccgtacgatcaaacaactgaaaatcaatttcttcttctaatagtttcatttgtcgacttaaagcagactgagcaataaatagcttttcggaagcagcagtaaaactcccttcttcaacaatttttatgaaatattggaattgttttaatgtgagcattatcatctcaaaattagataatttggtctattttctatattagattagatagatctccttcgctagaattttattaagactattcacttgattgaattcttcatgaagtatttaaaaggtttcgcaatatgcaccattgttattttaattttatggtgctttaaattttatgatcagcaactacccacacagcccaaacaagacaatatagagctatatgattaaatagtttttcccaaaacaaaaggcatgcactcacataagcgcatgccttttccatatttaaattaggctttctttaaatcgagctttttcaaaacttcagccacagcaatcatggcaaagcttgaagtcaccaccaccgctgaaccatagccaccacagcgcaagccagccgatgggcagacatctgcgcttgaaaatggattgtcgattgagtaaatacaggtaatgccaaatttctcttttggctttttacagatgccacgagcacgaagctgactacgtagcttcgctaacattgggtcttgttctgtttttgatagatccgccacgcgaattttaagtggatcgagcttaccccctgctccaccggatacaattaaaggaattttattaaaacgacaatggagcattaaagccagttttgctttaacatcatcgatgcagtccaaaacaatgtctggtacagggtttaaaagctctgcaacattttcaggtgttaagaagtcatcaataatattgactttaatgcgtgggttaatttggcgacaacgctccgccataatttcaactttttcacagcccagagttgaggtcattgcaggtagctgacggtttacatttgatgccgcaaccacatccatatcgactaatgtgatctcaccaatacctgtacgcgctaaagcttctactgcccaactgccgaccccaccaataccaatcaccatcacatgactttgttcatagtgctggaacgatgaatcaccataaattttggctacacctgcaaaacggcggtcatattcatcattttgtggtaaatcggacatggaaatggctttctctaaaaaatcaaaccatatattttactgttttttacgtagagcgtcttgccgctcttacaaataaaaatacccagtaaaattgcaataattgaattccaccaacttacttttatttcaaagcaaaaatgaagttgatttcaacagatgcattttttggaagttggtacacgctgaccgatgtacgtgtatgccgtcccgtatctaaacccaaaatttcataaagtatttcagatgctccatcagcaacttcgctttgctgtataaaagatgacgttgaatgaacaaatacattcatttgtaaaacttttccaataacatctaaagtcccatagtgctgttttaaaattgctaaagctctcatggtgctaatacttgcagcaagctgtgcatctgataaatcaacatctaatccaacttttccacaaatctgtaccgtatctcccactcttggaatttgaccactaataaatacaagtccagcgtgttcaattaatgaggtatatttacctcctatttttatatcccctgaaaaatcatatcccaatcgagattcaacttttaaaaatactgtatctctacccataattgcttcttcttataacaaaaattattttatttatatttagcttatccattaaataaagacaataaaaaagcctcatgaatataaggcttttttatatagcttttgaaaaatagacatttatgaagcaatcaaattccgaagtacataatgcaaaataccacctgccttaaagtactcaacctcatttaacgtatcaattcgacataacacattaaaatgactggctaccccatttggccctttcacatcaacctcaagaatttcatgaggctgaataccatccgataaaccacgaatcgaaatgacttcatgacccgttaagttgagggactgtctggtttggccatcaacaaactgtaatggcaacacgcccatacccaccaagtttgaacggtgaatacgttcaaaactttcagcaatgacagcttttacacctaacaagttcgttcctttggcagcccagtcacgtgaagaacctgttccgtattctttaccagcaataatcacaagcggtgtatgttcttgttggtaacgcattgccgcatcataaatggcaagcttctcaccacttggcacatgtatggtattaccgccctcttcgccgccgagcatttcgttcttaatacgaatgttagcaaaggtgcctcgcatcatgacttcatggttaccacgtcgtgaaccataagagttgaagtcttttggctcaacaccttgctcttgtaaatagcggccagctggactgtcttttttgatattacccgctggtgaaatatggtcagtggttaccgagtcaccaagcactgccaaaatacgtgcctgttcaatattcttgattggttttggtggctcaccaataccttcaaagaacggcggatgacgaatataggtcgagtcatcagcccattcgtaagttttactttttggaatctgaatcgcttgccagctttcatcaccatcaaacaccgcagcatattctttgtggaacatgtcggtatttactttttgtaagacagcatcaatttctgcctgacttggccagatatcttttaagtaaacaggttgcccatctttaccttgcccgattggttgagtcgttaagtctgtacggatattcccaactaaaccataggcaaccacaagtggtggtgaggcaagccagttggttttaactaatggatgcacacgcccttcaaagttacggttacccgaaagtacagatgccacgtttagatcatgacactgaatcgcatcttcaattggttcaggtaaaggacctgagttaccaatacacgttgtacaaccataaccaaccaagttatagcccaactcatctaaatacggcgtaagcccagccgccaataaatagtcggtcacgactttagaaccaggcgcaagtgaactttttacccacggtttacgctgcaaacccttttcaattgcttttttagcaagtaaaccggctgccaacatgacacttgggttagaagtattggtacatgaagtaatcgctgaaatcacgacatcaccatgatttaatggatattcttgcccttcaattacacaagatgggctttcatgctgaatattggctttggtcgcttctacagccgtaccgccaccgccttcattttctaaacgttctttcgcttctttggctggcttaagggttaattccatgagcgcattaaacgttttaggtacttccgataaaagtacgcggtcttgagggcgttttggacctgccaaacttgcctgaaccgtactcatatctaaacttaacgtatctgtaaacacaggttcatcacccgcattacgccataaaccttgcgccttgctatatgcttcaaccaatgcaatacggtcactttgacgaccagttaatttcaaataacccaaagtcacttcatcaattgggaagaaaccacaagttgcaccatattcaggtgccatattagcgatggttgcacggtcagcaagtggtaagtcggctaagccatctccatagaactcgacaaatttacccactacacctttttggcgaagcatttgagtaatggtaagcaccaagtcagttgccgtaatcccttcttgtaattttccagtcagtttaaaaccgatcacctcaggaatgagcatagaaataggttggcctaacatggcagcttctgcttcaatccccccaacaccccaacctaatacccctagaccattaatcatagtggtatgtgagtctgtacccactaaggtgtcagggaaagcaaaggtttgtccgttgtcttcacctaaccacactgcttgagccaaatactctaaattgacctgatggcaaataccggtacctggtggcacaacactaaagttattaaatgcagattgtccccaacgcaaaaattgatatcgctcgccatttcgctgcatttcaatttgaacgttttcttcaaaagcctgatcatcggcaaaatggtctaccatcacagagtggtcaataaccaaatctacaggtgataacggattaattttttcagggtcaccccccgcttcagccattgcagcacgcattgcggctaagtcaacgactgccggaacgccggtaaaatcttgcattaaaacccgtgcaggtcgatattgaatttcttgatctgaggtacgggtttttagccactcagctaaagcataaatgtgttctgttttaacactgagctgatcttcaaaccgtaataagttttccaacagtacttttaatgatttcggcagtttggcaatgtcacctagctttttctcggcttgggttaagctaaaaatctgataattgctggaacctactgttagcgtctgtaaagcattaaaactattgatattgctatacttagccattgggttatcctcccatgtctggcaatgttatttttcacgtttttacatgttgttttcttactttaagcttcttttttaatcgctgtgttttgttttagttactatttctaatctttgatttttattacgataatttcaaagcagataaagagtttttccacagcaaatctgctaattctgactctgccatatttaaattttcagccaaactttttagtacataaggtaaattcacaggcgtatttcgagtacgctgctcagttgaagtttggcagcaaagtggcgtcatatcaggacagtctgtttcaatcactaaatgctcggcacctatagcctgcacaaccgtatgaagctttttcgcattggggttcgtgatttgtcccgtcacaccaattttaaaaccaagcttaatcaggccttttgcctcctctactccgccactaaaggcatgagcaatgccaccgagtttaaacttatgcgcttttaatagtgcgagcacatcaccatgtgcttttcgtatatgaagcaacaccggtttttggtattgagttgccagatctaactgatcaccaaaatactgtttttgcttggcatatatatcgggctgcttgtgttcctttaagaaggtatctaagccgatttctcctattgcgacgcagtcttcttgctgcaaaatctgttcaagatgagaaagatgctctggtttgtgctgctcaatataaaacggatgcaaccccggtgctaaataagaagtaggcacgttgtcccactgcttgagctgatgatgggtttgtaccaaatcatcaaaacgtgactgtaaaaagcctattaacaccagagcatccacacccacttttttagcttcaagtgctaactggtgccgatcttcatcaaaatcggcaacatcaaaatgggtatgagtatcaaacagatgcattagctggcactttttgcggcaggtgtcgaagctggtttagctttaggctgcggcaaatattcttctttcaatacttcttgtaattggtcatatggaatgactaaacgaggtagcccgaccacataaggtccaatttcatattcgccatattgaagaatcaagccttggtcacctaataggaaattttctgtgagtttaaacggccaagcttgctcatattcactcacactatttgcaagttttgagtctgtcacccaagctttaaacgcttcatgtgctaatttttctaaagccgcttttttctctggacgtaacaagtcttcaagcttgacctgcttttctttctttaaatcaaaattataatattgctgcgctgccgagccatgtgccccgcctaaatagctactactatttacaacaacagttacgactttaccttgagactgtatgattttaggtttcaccaacagattaatctggtgattactacttagagcctttaattcattgtccaaatcaataaatgaatttgcatagcgctgaacctgagcatcgaaactatcttgttgctctgtagcggcagctactgaagcttctgtcttcttatcagcttgtgctgcttttgcatctggttctgcaatttcaagaatctgtccgagtgcttttaaaacttgttgatcaataatcttatcaataaaagggaaattactttgtaggcgttctaccgtaaattcagggcaagttttaccatcacaatccggtaaagtcactttacttggaactgtttcccctttcaaagtcagttctacaggcttttgttcaaccacagccggtttttgctgatcttccgactctttaggatcacttttaggctgacatgccaccaaaaatatcgcagaagcaagtagcgttaaacgtagcgaagccttagaagttaacatcatattttgcctttattctgagaagattatgcataactcatatgaagttagcgcatctacaagtaggttgcaaattctgctaccaacttaaaacatttgttcataaacctgaggttgcaatatttttttcgtttgttctgttgttaaataaatatcaagttgaggcgcatctttcgtaatctgatttgcctgatagtgcaaacctaccccttcaccatcaaagaaccagtcagcttgtccccaatataaagtttttggggcctgtttgttgacatcggcagtttgctttttcaaccagtcctggtacgcagtttgaacaatttgatgtactgtcggttgctggtcttttttaagcacatcaagcaacgttaagtttttatgaagtttacgatcagccacgaaaaaataataacggtcttttatggtgatctcttcttgtttactgtctaaagccaattgcaataacacatactggttacgctgcgaggcaatgcgtgtacgaatgtgtaattcataagcacgatttttagaatatttatcttgccattcatccgactttttcacgtaagcattaatcgcttgttgaaggcttaaatcttttttcaaattaatttgagcttgaataactttcgcctgatttttttcaatccagctatttaaccacgcatcttgggtttttatggtttgaatatcgacatcaatacaatttttcttttcacaaaacggcactgcataacttgctttggtttcggtcaaatttaaataaggtaaaacctctgctttctcaaccggatggtcttgagtagaagctgaattttcttgagaagatgatgaagactgaggctttttccagacaaatacacaaatagccaaaattagagctatggctgcaaccacaagcgcaataattgtctttttactcaagttcatttcatcatcctttcttatttttcaaaacaaaacagcttctattcgaagctgtttgtcacatttacatgattagtgttcacgtgtgctacggaactcaatatcaggccaacgctcttgcataatctgcaagttcactcggcttggcgcaagatacgttaagtgtccgccaccatcaatagaaagttggtcatgtgcctttttcttaaactcattaagaatcttttcatcatcacaatgaatccagcgtaccgtatttacacttactggctcataaacacagtcaactttatattcttctttcaagcggtaagcaacaacgtcaaactgaagtacacccacagctcccacgatcaaatcattgctaatttgtggcataaatacctgagttgcaccttcttcagacaactctttcaaacctttttgcaactgttttgactttaatgggtctttcaaacgtacacggcggaacatttccggcgcgaagtgaggaataccagtgaagtgcaagttttcaccgctagtgaaagtatcaccaatctggattgtaccgtggttgtgtaaaccaataatatcgcccggccatgcttcttctaagtgctcacgctcgcctgcaaggaaagtcaacgcatcactaatacgaacctctttaccaatacgtacgtgattcattttcaggcctttctcgtatttacctgaacaaatacgcatgaaggcaatacggtcacggtgtttagggtccatgttggcttgaattttaaatacaaagccagagaaaccttcttcttttgcttcaaccatacgctcttgcgttggatgtgctttaggttcaggtgcccagttcataaatgcatcgagaacgtggtcaacaccaaagttacctaatgctgtaccaaataaaacaggtgtttgtttaccttgtaagaaaagttcacgatctaatggctcatttgccatttgtacaagctcaagtgactcttcaaaagaagcccaagctaactcaccaactttttcacgaatatcggcgtgattatagccatcacgtacttcaatatcggtaatggttgaaccaaaacctgctttgtagacatacaatttatcttcaagaatattgtatacaccagcaaagtcacgacccataccaagtggccatgtaattggtacacagcgaatattcaagacgttttcaatttcatctaacaactcaagtggctcacgaatttcacggtccattttgttgacgaatgaaataattggtgtgtcacgcatacgacacacttccatcaatttgatggtacgttcttcgacaccttttgcaccgtcaatcaccatcagtgcagagtcaacagcagtaagggtacgataagtatcttccgagaagtcttcgtgccccggtgtatcgagtaagttaatcgtgtgacctttatatgggaactgcataacagacgtggtgatcgaaataccacgttctttttccatttccatccagtcagatgtagctgcacgatcagatttacggctttttaccatccctgcaacctgaatcgctttaccccataacaacagtttttctgtcatggtggttttaccggcatcggggtgggaaataatagcaaatgtgcgtcgttgagcgacctgtgccgctaactcatctttaaaactcatgaaatacacctactgcggagattgcagtgccaaagatctaaagtcgatcaaaataaaaattggcgtaattgtagcagatttataggtactgtttagagattgttgagttgtctatccgtgttttcatatttggaatatttttaattgagccattaaaaaagcctgttcaatatcaacaggctttttatgaataaacttagacgtttatgctaatttcttttcttcaataaattggacatcggcaatttgtgcatcccaaaactcggtccacagtgcacaataatcaagacatagttgagtcaagctttcataatcatctttggtaatggcttgagccaacgcaaaccaaaggtcatcctgatggtcatcatcagcagcttcagctgtttcatctgttgaaacgccgtgtacatggtaataaccaccaccctcaacatcgatatttacaaacttggttgcttgtcgcaatggtgggctaaaaagaataacttcttcttctgccaccgccaataatgccaccacattaatataacgatcgtaagaagcttctaaaaatgttctcacctgatctgcaatttttgaaggtttataattacggcggtcagcctcagtcaaaccatagtcatttagcaaatcttcatataatggataatgtgcatattcagggttgcctaaataataattatctttatctaaacccggtcgaaaaccaaattcatctaatatatttaagctcaacaacacccgtggaaacattttagcacccgagtgaagctttggttccaattgctttgtcagaaactgcgcctttaataaagcatcggtaaaaatctgaacaatggcatgacgatattctaaatgaatacgagtcaaggtttgtttatcaagataaccgttatttaatatttcaattgcagggtgtttacttactggcaattgcgcaattttattccttaattgtttgagaaacagtaagttttcttcccattgtgaagcaggaatactatctttcatcccctgcaatgctttttctcttggattattaaagtcttcaaatttttttgacataatcattctcaataaaaagtttttcttatagttaagctaaaggctatccctctatttccattacgtattcgaacgtaaaaaggataaattccgtatacccatacttaacgaattgatattatgtttattatctcaacaaatcaatggattaattaatattatttaaaaaagtaaactattgccaataaaatatttatttctttatttatcaaggcaaaccaagctattgaataaatataattttttaaatatcattaaataagttttatttaagctttcatactttacaatagcaaagttaatcaaaaaatatctatgacggggcaaccaatgtcaaaaagagaaacgattataacaacagcaatgaccctttttaatcagaaaagttatacctctattggggtagacaaaattattgctgaatctaaagttgcaaaaatgactttttataagtacttctcttctaaagaagttttaattgaagagtgtcttcgccgaagaattttagaagtccaaacttctttattagataaagttaatagtgcagatgacccattaaataaactgaaaagtatttttaattggtatatcgactggattaacactgaagattttagtggttgtttatttaaaaaagcaacgatagaagtcctgcagctctatccttctattaaaaaacaagtaaataaataccgtgaatggatttacagtttagttttatctatatttttagagttagaaattgaagatccaaaagtattaagcagtctttttcttaacattatagatgggcttattattgacgggactattaacaaaccagaaattaactctgaagaaacatggtcttatataaataaactcattgaacttgaaacaaaacaaaaatatgaagccgcttaaaaaaatttaattattacggccctttaccatattataagttttatttttgaagatgagaggagctgtaatacatgctctatcaggtgatcagatctgttttttatctggttcaatataatgttcaggttgatatgttttaaaagcataaccgcctgaactttatataaatttagttattctaaatatatcaattaataaacatatagattttaataagttaatctttaagaaaaataccctttaaaatataagcgaataacagttctctcgtatcacccctagtttcatctagcagctgaataatggcaccatctaatgtaaataaaaacatatcgctatcgcttttcgtagtgtctttcttcacagttaaaagcaatttataaacttcagtagttaaccaatgccgatattgtacaaccacttgataggctgcgggatagagtttctcaatttcaaaaatagccctaaatagcaagtggtaataaccatccagattagtatgtaaaaagaaaatctttttgagtttttcacgcaagattaaatctttttgtatgtaaatgattgagcgcacttgttcttttaagacgtctttttgaaagtgtaggcacatttcaataagccgttctttagagtggaaatagttataaaacgaagcttttggcacctctgcttctcgcacaatgcggtctactcctacattatgaaaaccatgtttattaaaaagatatcgagacttatggagtacgcttaacgcgcgaaatgagagatctgaatatgacatatagttaccgttataaaataatttcttgttgtgtatagagataaaatgactgcaacttttgctctaagcaaaaaaagcatgcaaaggccccaaagactgcgctaacgcatctcaagttttattgttgatatgattttttagtcgtgaagaactgatgcctgaaaacctaaaggtgatcaaactgcataaagactaactgggaggtgtaaaaatagtatgcatagccaactccttattttgggagttctgccaaagcattaataaaagattatggtggcagaacgagcaagggttcgcagactgatagtaaagaatcagcacacccaaaggtgtccctcactcgtcctaccgcaacgagcgagggacgattgtacacacaagactactcctcagagggaataatctgatgcctttactaatcggtctgcgacaaccggctggcaatgtaggccagcaggcaaaggataatctgagagtttaaaagtgtcaatgtggaatttatgacaagttttaaaaattcttattatttttcattagattaactaaattattattttagatattatattaagtagtagtttttaaatttaaccaaatatctggtttaaacaaaatgagcaccttgcgactgaatcagttgccctacatttacaggcatacccaacaaataaccttggaactgctgacagcccaagcgtgttaaaatctcaacttgttgctgtgtctccaccccttcggctgttacggttaaacctaactttttcgccaaatgaataatactttctaaaatgacttcttcttttgagcccggttttaaatcgacaataaatccacggtcaattttaagttcatcgactggtaaatcttttaaatataagaagcttgagtgccctgttccaaagtcatcaattgccacacgaatgcccatatcgcgcagtcgctcacaagcacgaatgcttaagtcgatatgccgcattgcggttgattcggtaatttcaataatgaggtgatgcggctgaatttgatatttttttaacaaaccttcgagagtactaaagagctttttattttcgaaccgcaaggcagataaattgactgcgattggataaaactgcgtattgctacgttcccattcctgaatttgttggcaagcttgctcaagcgcccaatatcccattggaataattaaacctgtcttttccgcgccaccaataaacatatgcggtgtcagcatacctaaagatggatggttccagcgaatgagtgcttctaccccacaaatctcaagattggtattaaattttggctggtagtagagaacaaattgtttttcttcgactgctttgtataaatcattgatcagttttgactgacttcttgtttcttgttgatgggtagaataactaaagacggtataagtattgcggccctgctctttagacatcagcatggcagcatcggcattcattagcaggtcttgaacattttgcccatgttcagggaatagtgcgatacctagacttgctgaaatattaatttctttaccggaaatttggtaactgtcttgaataagatgtaatactttttcagcaagttgcattgcctcttcagtatcagtgttttcagcaatgagtaaaaactcatccccaccaattctaagcaatttacatttttcattgagttgccaatgtaaccgattggccatttgtataagcagttgatcaccaatgtggtgtccaaacgcatcatttaccgatttaaaacggtctaaatcaatatagagaaaagcaattttttggtctttataacggtgatctgacaggaggacttcggcgtaatccactaaataaagtcggtttggtaatttagttaagttatcttgaatagaaaggttggctaattctttattggctttgcgcagttctagatttcgctggttcagtcgttgttccagcacggcaacaataaaactcgcgaccagcaccagacaggtaaccaaaataattgtaaatagtagcaagtcatgttcagcctgatattggcttacaaacttatcggtaatatttgtcgaaataagtgccgtatagtgcatccccataatacttagggtcatcatcactgcaaaggctaattttaaacttatacggtgccgttcactttcttttaatttataggccagcaagaaagctagccccgacccgctcatggcaattaagacagaaaataaaataagaaaggaagtgtagtctttcttataaatatcaatattccagcctaacatactcacataataagaagcagaaattccaattcccataatgactgagcttaaaatgagtctaaatataggaagtgtaaaacgagaagtcagccaaattgcgacacttgaaagtacagcactaattccaaaagccagtgtaattaaaggaacgttcgaggaagctgcttcaaataaatggtaagcatgcatgccgacaatatggacaatactaatcgctgctgcgagtaataatccattgagtaatagaataaacggctcaatctttttataagtttgcttaaatattaactgctccatggaaatcacaatatagcaaatagcgccagccgcaataaaagagccgacgatcaatgtgctatcgtaatcaacatgacccatattggacttccatgattattcaatacttttttttattttgttcaactcattgcacaaaatacaattaaacacgttaaagaaaaattagtaaattcgacttttttagtcagttataaacaataacattatctaacatttggtcaagtattttttactttagaaatcaataaagtaaacaaaaattaagcatccaattatatgaaaaatataggatttcttaagtctaggtcaattgaccttaatgatgtttttttaaacttgttttaggggctaataaaataaaaaaccctgcatttagcagggttcttttaaaaacaatagaaaagaaaattagtttttctctttgtctacgatcttgttcgcttgaatccaaggcatcatcgcacgtaatttagcaccagtttgttcaataccgtgtgcagcattttgacgacgacgagctgtcatagatgggtagtttaacgcaccttcttggatgaacatcttcgcgtattcaccagattgaatacgttttaatgcattacgcattgcttcacgagactgttcattgattacttcaggaccagttacgtattcaccgtactcagcattgttagaaactgagtagttcatgtcagcgataccgccttcgaacatcaagtcaacgattaacttaagttcgtgtaagcattcgaagtaagccatttctggtgcataaccagcttcaaccaaagtttcgaagcccattttcactagttcaactgcaccaccacaaagaactgcttgctcaccgaataagtcagtttcagtttcttcacggaatgaagtttcgataatacctgtacggccaccgcctacgccagaagcgtaagaaagcgcaacgttacgtgcattaccagaagcgtcttggtgaattgcgattaggtcaggaacacctgaaccacgttggaattctgaacgtacagtgtgaccaggagctttaggcgcaaccatgattacgtctaagtctttacgtggaacaacttggttatatagaacagagaaaccatgagcaaatgctaaagtcgcgccttctttgatgtttggctcaatcacgtcacggtaaagttgtgattggaattcatctggagtcaaaatcattacgaggtcagcttgcttaactgctgctgggacttcagcaactttaagaccagcgttttcagctttcttccaagaagctgaaccagcacgtaaacctacagttacgtctacacctgagtctttaaggttaagtgcatgagcatgaccttgagaaccgtaaccaataatcgcaactttcttgctttggatgattgataagtcacagtctttatcgtaaaaaatttgcatttgtgttctccgctaaaatactttttaaaaaattaaatggctaaaactttttcgccacgggcgatacctgatacacctgaacgaacgacttcaagaatggtgttttctgcaagcgcatcgataaaaccatctaatttttcagttgtccctgctatttgaatggtataggtcgttggtgtcacgtctacaatttgcgcacggaaaatatccgcagtgcgtttaatttcagcacgtgaagcacccaatgcttttactttgattagcatgagttcacgctcaatgtgtgaaccttctgataaatcaactacttttaccacctcaacaagcttgttgagctgtttcgtaatttgttcgatcttatggtcatcgccataagtcgttaacgttaaacgcgataatgtcggatcttcggttggtgcaacattaagtgtttcaatgttgtagttacgttgactgaataagcccaccaaacgagaaagcgcaccagcttcgttttcaacgagtacagaaataatatgtctcattaaatgcgctcccctttagaaatccacatatcacgcatagattgacctgcaacctgcattggataaacgtgttcgctacggtcaaccataacgttgataaatacgcatttatcattgattgccattgcttctgcaagcttagattcaagttcatcggcatgattaatttgaatgcctacatgaccataagcttccattaacttggcaaagtcaggtaatgactcaacataagaacttgaatgacgaccttcatagttcatatcttgccattgtttcaccatacctaatgcacggttgttcaagcacaagatttttacgttcaagccatattgtttacaggttgaaagttcctgaatacacatctgaattgaagcttcacccgtaatacaaacaacttgttggtctgggaaagcaagcttcgcagccattgcataaggtaaaccaacacccatggtgccaaggccacctgagttgatccattggcgaggacgtttgtacttataataaagtgcaccaaacatctgatgttgacctacgtcagaagtaataatggcatcgccattggtcactttatataaagtttcaacaacctgctgtggcttcatagtgccatcagatggattttcatatttcaagccatgaactttgcgccattcattgatttgagaccaccaagccgcaattgcttcaggatttggtttagacacatttaattgttttaactgtgccaacatttcttgaagaactggctctactgcaccaacgatcggaatatgcgccataatcgtttttgaaatagttgcagggtcgatatcgacatgaatcacttttgagttcgggcagaatttggctgggttatttgttacgcggtcatcaaaacgcgcaccaatcgccaaaattacgtctgcatggtgcattgccatattggcttcatatgtaccgtgcatacccaacatgccaataaactgtgggtcatcgcccgggaatccgcctaaccccataagtgtgttagttaccggataaccaagtaaatgtgcaagttcggttaataacgcagaagcattcccttgtacgacaccaccacctgtataaataacaggacgttttgcagttagtaattcatcaattgctttacgaatttgaccagagtggccgcgtgaaggtggttgatatgaacgcatcttcactttttcagggtattcgtatgcaaacttttctgcagggttagtcgcatctttaggaatatcgactacaactggaccagggcgcccacttgatgcgatatagaatgcttttttaataattgcagggatttcacttgcgtggcggacctgaaagctgtgtttcacgataggacgtgaaataccaaccatgtcagtttcctggaaagcgtcttcaccaatcagatgtgatgcaacctggccagacaaaaccaccattgggattgagtccatataagctgttgcaattggagttactgtattggttgcgcctggaccagaagtgaccagtactacgccagtcttacctgtagcacgcgagtaggcatctgccatatgaccagcagcttgctcatggcgcacgaggtaatgattgattttgtcttgttgaaatagcgcatcataaatatgtaatactgcgccgcctggataaccaaaaacatgttcaacgccttcgtccgcaagagcgcgaacgagcatttcaccaccagataaaagttccaacgtgattcaccctaaaatcttatatcactattttatggaaggcataaatagtgtttcattcattgaattgtctgcactgttatagcacacatattgtctagttttcgttgcaatagaaaaatttctgtttttcagccgtataagctgttttaacattaataaagcatgtctggatatacatactttagtaaaatcaatctctcggctagagagaatgtctattacaaaacatgacagttattcgaagggtgatcgagtaaatgcatataaaactagagaaagcatttttgttgtttctatatacaaagtcaagaataaagaaaaggtttttccataaaaaaatttagctgctgcttttttaatctaatattaaatcgtgaatttactcttcttagctcattatttattaaaaattcattatttttatataaaacgatccattctaaattgcttatttataaagtttatttaaatatagtcagtttacattggggaagaactgatatgaatttatcttatttaaaaacaagcctgtatacagccgctacaacagcgattttactttgctcaagtcaaagtcaggcacagcaatattataaatggatggatcaaagtggctcgacacattacaccacgacgccaccacctaaaggagcgaaacatttgaacaaagtttcgacttacggcagtcaaccattgttgaaaaatccaacatcaaacttagaacaaccatctcaggataaagtcgtgcaagaagtaactaacgtagcagtggaaaaaggtgcacctgctgtcccggtcccacctgccccgtctgtatcggcaccaagataattaaaatgagagtggtgaatatttttaccactcttcgattatttaaaataaacaagaatagattgggaaattttatagcgcagattaaaagataaaatcctgctctaaaaactgacattttcctctattttgcgctatgctgtgcagcaatctttcatttcaattttcgttgtatagcttacgtctatgactatttctcacattgacccagaatatcaagcaaacacgattgaaccatcagtccaacaagattgggaaaatcgtaaagtctttaaagttgccgacactgtcgaaggtaaacatcgctacatcctgtcaatgttcccttacccaagtggcaaactgcacatgggtcatgtgcgtaactataccattggcgatgtaattagccgtttttaccgtttaaaaggcgaaaccgtattacaacctatgggttgggatgcatttggtttaccagcagaaaacgctgcaattgcccataaagttgctccggcaaaatggacatttgaaaacatcgcttacatgcgtgaccaattaaaaaaattaggtctatctgtagattgggaccgtgaatttgcaacgtgtacaccagagtactatcactgggaacaatggttgttcgttcagctttataaaaaaggtttaatctaccgtaaactttcaacagtaaactgggacccggttgaccaaacagttttggcaaacgaacaagttgaaaatggtcgtggctggcgttcaggtgcattggttgaaaaacgcgatattccaatgtactacttccgtattacggactatgcacaagaattattagacgacctagacactctacaagacggctggcctcaacaagtgttgaccatgcagcgtaactggattggtcgttcgacaggtatggaaattaccttcccatctgccaatactgaaatttatgctgacggcttaactgtttatacaacacgtgccgacacacttatgggtgtgacgtacgttgccgttgcagcagaacaccctcttgcgcttaaagctgctgaaaataaccctgaattggctgcatttattgaagaatgccgcatgggttcagttgcagaagctgacttggctacagccgagaagaaaggtatggcaacaggtttgtttgtaaaacaccctgtaactggcgaagagcttcctgtctggattgcgaactacgtattaatgtcttacggttctggcgcagtaatggctgtaccagcacatgatgaacgtgactttgaatttgctaacaagttcaacttgccaattaagcaagtcattgatgccaaaggtgctgacgatgcagattattctgctaccgagtggcaagaatggtacggttctaaagaaggtaaacttgttaactctggcgagtttgacggtctagaattccaagctgcattcgatgcattccttgcgaaattagaaccacaaggtttagcaaattctaaagttcaattccgtttacgtgactggggtgtttctcgtcaacgttactggggttgcccaattccaatgattaactgtgatacttgtggtcaagtcacagttcctgaagatcaacttccggttgtattaccaactgatgttgttccagatggttcaggtaatccactaaataaaatgcctgaattctatgaaactaaatgtccttgctgtggtggcgatgcacgccgtgaaacagatacattggacacattcgtagaatcatcttggtactacgcacgttatgcatctccagactttactggtggtatggtaaaacctgaagcagctaaaaactggcttcctgtaaaccaatatattggtggtgttgaacacgcgattcttcacttactttatgcacgtttcttccacaaattaatgcgtgatgaaggtgttgtacaaggtaatgagccatttaccaacttgttaactcaaggcatggtgcttgcagatactttctatcgtgaagcagaaaatggtaagaaaacttggttcaaccctgctgatatcgaattagaacgtgatgagaaaggtcgcatcatttctgcaaaatattcaggtgatggtcaagaagtgattatcggcggacaagaaaaaatgtccaagtcgaaaaataacggtattgacccacaagccattattgatcaatacggcgcagatacagctcgtgtatttatgatgtttgctgctccaccagatcaatctttagaatggtctgatgcaggtgttgaaggtgcaaaccgtttcttgaaacgtgtatggcgtctggtagcaagcttccttgaaaaaggaaactctgcaacagcaatcgataaagcaaacttgtctaaagatgctcaagatttacgtcgtaagacacacgaaaccattcaaaaagtaagtgatgatattgagcgtcgtcatgcgttcaatactgcaattgctgcattgatggaattgttaaacgcaagcaataagtttgaagcaaaagatgacaatgacgttgctgtagaacgtgaagcaatcaccacattgttaactttacttgctccatttgctccgcatttaagccagactttattggctcagtttggtacggacttaacagaagcaactttccctgaagttgatgcttctgcattaacccgcaatactcaaacgattgttgtacaagtaaatggtaaacttcgcggtaaacttgaagtttctgttgatatttctaaagatgagttattagctcaagcgaaagcattaccagaagttcagcagttcttaacaggaccaaccaaaaaagagattgtggttccaaacaaattggttaacctcgtggtttaattacaggtattaatgagaggatcaagcatgcacttagcccaacgtttagccgctgttgttttaaccttaggccttagtgcaggcttagtcgggtgtggtttccatttaaaaggaaccaacccgactgcgactccacttgtttataaaaaattaagccttgagttaccggcaaaaaccgatgaccttgaaacacaattaaaagtgtatttaacggcaaatggtgttcaactcagcaatgacaacgacgcctatgttcttcgtgttttagaatacacgcctcgtcgtcagcttctaaatggtaaacttacagaagtgttattacgcttgactgtaactttccaaatcgaagatcgtcaaggtaataaaattacagagccgcgtactttaaccgcagctcgtagttatcaatatgatttggcaacggtcaacactgagaaccagcaagagagttacttgcaacgtattgtaattgatgaccttgcacagcaaattactcgtcaaatttcagccaatcgcttaccaaaagctcaaccatagacgtatcttttcttaagtaatgaaacttgactatttacaagccctcaaacgcattccggaagctcggggtgcgtggatcctgcatggacaggaacctttattagaacaaaatttactcgacactttccgcaaaagctggcagcaacaagacattgaaagacagcgctacgatattagtagtgtaagtgactggaaaaatgtctttaatgcactgaacagcctatctttattttctcagcaacttgcgattgaagttcacggcaatatcaagcccgatgccaatggtttaaaacagctaaaaagttatatccagcataatgaaactaacctgctgttaattgttttacccaaacaagacagtagcagcttaaaatctgcttttttccaagttgttgaagcgaacggtgtggtggttgcccttactgctaactatccgcaagaccgtcaacgaatattagccgctgaggctgagaagttagaaattcaactcgacaatgatgcttggcagtggctcatgcagcatcatgagcataacctgctcgctgctaaaaatagcttgatgcgggtaagagatacttttccagaccagaaactaattcaaattgaacagttatatgcatgtctacaagatcagtctcgttacaccacttacgatttaagcgatgcgttattagaaggtaatcttgctcagtccattaagatctttcaatatttaatcggttccggtgaaccggaaagcttaatcttatggacattaagtaaagaaatgcgtttattaatgcagttgtttgaacaaccacataatgcattacaactgggtatatggaaaacaaaagttagcttataccaacaagcattaagaagactcaatccacagcaatttttgggatggtctgccctgcttttacaaattgatgccgcaatcaaaggcatgtccaatgagaatgcccaacatttaatgcaacaagccattgccgagctgtgtggaaaaacattatttatacattagggcagccaaatcatttgcctgctttattgaaatatcataaaaattcacgttttatcctcatttgactcttatactaagttaaattttagacttttcgacctctcgccatgccaaaaataaagccaattaaactcgtaattattgtcgtctgtatcgccattattgctgtcttagcttggaaattcttaaagcctaaacaacagcaacctcaatatattacagcagaggtaactcgcggggatattgagaataatgtacttgcaaccggtacacttgatgcaaccaagcttattagtgtgggtgctcaggtatctggtcaggtcaaaaagatgtatgtacagcttggtgatcaagtaaaacaaggtcaacttattgcacaaattgactcgaccacccaagaaaacagtttaaaaacatctgatgctaatattaaaaatttagaggcacagcgtcttcagcaaatcgcttctttaaacgagaaacaactcgaatatcgtcgtcaacaacaaatgtatgctcaagatgcaacacctcgtgcagatttagagtcggctgaagctgcttataaaacagctcaggcacaagttaaagcattagatgcccaaattgaatctgcaaaaataacgcgttcaacagcacaaactaatattggctatacacgtattgttgcaccaactgatggtacggttgttgcgattgtgactgaagaaggtcaaacggtaaacgcaaaccaaagtgctcctactatcgtcaaaattgcaaaacttcaaaatatgacgattaaagcacaggtgagtgaagccgatattatgaaagtggaaaaaggtcagcaggtctatttcacgaccttaggtgatgaaaccaagcgctatgcaaccttacgtcaaattgaacctgctccagattcgatctctagtgaatcaaacagcaccacaagttcaacaacaagctcagctgtttactacaacgctttatttgatgttccaaatacggacggcaaattgcgtattgatatgactgcacaagtttatatcgtattaaattcagcaaaaaatgccttattggttccatcttctgcgttaagtagcaaacaattttctggccaaagaaaacagggtcaatcagcagataaagcgagttctactccaagtgcagaacgcaagcatcaaggtaatggtgttcgtttagaacgcttaaatttaactcctgaacaaaaacaacttattgaacaaggcaaagcaacactaagtgtagttcgcgttttacaagcagatggtacgactaaaccaacacaaattttggtaggtattaataaccgtgtaaatgcacaagtacttgccggattaaaacaaggtgaccaagttgtgatcgctgatagttcagaaaactctgcagcttctgcaaacagtggtaataaccgtcgccgtagcggtccaatgggaatgtaagcatgacaaaacaagctttgcttgaagtcagcaatctggtccgggaattccctgctggcgaaagcacgattcaaattttaaaaggcattgacctgaccatttatgagggtgagctggttgctattgttggccagtccggctctggtaaatcaacgctcatgaatattttgggctgtctggaccgcccaacaagtggtagttataaggttaatggtcaagaaaccggtaagctagagcccgaccagttagcgcagttacgccgtgaatattttggttttattttccagcgctatcatttactgggtgacttatcagctgaaggtaacgttgaggttccagctgtttatgctggtgttactccagcagaccgtaaacagcgagctactgccctgctcacggagttaggtttaggtactaaaacgcaaaaccgaccaagccagctttcaggtggtcaacagcaacgtgtatcaattgcacgtgccttaatgaatggcggcgatgtgatcttggccgacgaaccaacaggggcactcgattcacatagcggcgttgaagtgatgcgaattttgcgtgaactcaacgcggctggccatacgattattttggtaacgcacgatatgcaagttgcaaagaatgcaacgcgcattatcgaaattagtgatggggaaattattagtgaccgtcctaatgttccagaccaatctttagaagaagttaaatctgatccagatgcagcacctgctttacaaaataagcagaaaaaaggcaaaagtatttcggcttggcgttcaaccctagatcgcttatccgaagcctttcaaatggctttactgtccatgaatgcccaccgcatgcgtacttttttaactatgctggggatcattattggtattgcctctgtcgtaacggtggtcgcactgggtaatggctctcaacaacagattttgagcaacattagcagtttaggcaccaacacaattacggtattccaaggtcgtggttttggtgataactccaagacagccaattttaaaacgctggttcctgccgacgccgatgcattaatgacacaaccttatgtcagtgcagtcagcccgatggtcagtacatccaagaccatgcgttatcaacaaaatgaagcaaatgcgactattaacggtgtaagtaacgattatttcgatgtaaaaggtctagtttttaaagacggccaaacctttgatcaacgaagtgtccgcgaccgttcgcaagatgtagtcattgataccaatacgcaaaaacaattctttagcgatggtactaacccaatcgggcaagtcgtgttactgggtagcgtgccagctcgtattatcggcattgtagaacctcagaccagcggaatgggttcggatgacacgctgaatgtatatatgccttataccacggtcatgagccgtatgttagggcaagcgcatgtccgtaatattatcgtacgtattaatgataaatactcgaccagtgctgctgaaaacgccatcgttaacttattaacccaacgccacggtgcccaagatattttcaccatgaacagtgacagtatccgacaaaccattgagaaaaccacaagtactatgaccctcttagtatcagcaattgctgtaatttctctggtagttggtggtatcggtgtaatgaatattatgctggtttcggtgactgaacgtacgcaagaaattggtgtgcgtatggctgtgggtgctcgacaaagtgatattttgcagcagttcctgattgaagcaattttagtatgtttgattggtggtgtacttggcgtactgctatcacttggcttaggacaactgattaataagtttgccggtggcaactttgctgtcgcctattcaaccacgtcaattgttgctgcgtttgtgtgttcaacattgattggtgtcgtattcggcttcttacctgccaagaatgcagcaaaacttgaccctgttgcagcactatcacgagaataaggaaaactgcatgtctttttctatgactaaacttagcgcagcacttctcctcactagttctcttgtgggatgtgccgctgtagtaaaaacaccttaccaagcaccagctgtacaagttccgggtagttttcagtacgataaggctaaagctaaaacagcatcggttgagcaatattctgaccgttggtggacattgtttggagatgcacagctcaaccaactcgtaactaatgttttagagcgcaatagtgatttggctgttgcgggaatcacactcaagcaagcacgcttgcaagctgatttaaccgcgaataaacaaggcttacggaccaactctagtgtttctacaggacattctttcgacttaaattcgggagatgacagcgcgaaaggtttatcaatgagtgctggggtgagctatgaacttgatttgtttggcaagcttgctcgtcaaactgaagcaagtaaatgggaagccttagcaaccgaacaagatcttcaagctactggtcaaagtctgattgccactactgcgaaactctactggcaactcggctatttaaatgaacgttatgcaactgcgcagcaaagcttagccacttcgcaaaagctttatcaattggttcaaactcagtataaagcaggtgcagtttcaggcttagaccttacgcaagccgagcagtctgttcaaagccaaaaagcaagtttaagccagattgagcaacagcttgttgaaacgcgtacagccattgctgtgttattgcatgagccagtacagcaactcaatattcaagagccacagcgtttaccacgtacagcgctgcctgctattggtgcgggtttaccagcggatattttgtcacgtcgcccagacttgcaagcagctgagcttcgcttgagaaaagcactagcaactaaagatgcaactaaagcaagctactacccgtcaattagcttaaccagtagtttaggttcaagcagcacatcgttaacggagttattacgtaaccctgcccttacgcttggagcgagtttaagcctaccgtttttgcaatataacgatatgaaaaaagatatcgcgattagcaacctagattatgaaaaagcgattattcaatatcgccaaacgctttatcaggcttttgctgatgtagaaaacgcgttatcaagccgcacagaactcgacaaacaagtagcgttacaagagcgtaatgtcgaacttgcagaaaaaactgaacgtttaactgaagtccgctaccgttatggcgctgttgcgttaaaaacacttcttgatgcacagcaaactacacgtactgcgcgcttgagtcttgttgaaaccaaacaaagccaatacaacgcttatgttacccttatgcaggcattaggcggttcacctgtaaaagaactgccgcaataacttgcgcccagtaaaaaagccgtagtccttcaactacggctttttttatgtctgaataaatcttaagacttattcatcatccatcatagattggctcatacctacagtattgaaaccagcatctacatataggatttcaccagtaatacctgaagcccaaggtgagcataggaataacgctgcattacccacttcttcaatggttacgttacgttttaatggcgcaactttttcgttagcatctagcattttacggaaagatttaataccagaagcagccaaagtacgaattggacccgcagaaattgcgtttacacggataccgtcaacacccaaacttgatgccaagtaacgaacgccagcttctaaagatgcttttgccatacccattacgttgtagttaggcataacgcgctcagaaccttggtaagtcaaagttaataaacaaccttggcgagcttgtaataaaggttttgcagcacgtgccattgcaacaaagctgtatgcgctaatgtcatgagcaattttaaaaccgtcacggtcagtcacgtcagtaaagtcaccgtcaagcgtgtgtgcaggtgcaaagccgattgagtgcacaacaccgtctacgccgtcccaatgttttgcaagttccgcaaatgcattatcaatttcagcatcaacggcaacatcacatggaaacacaagcttagaaccgaattgctcagcaaactcatctacacgtttttttaatttttcgtttggataagtaaatgcaagctcagcaccttcacggtgtaatgcttgtgcaataccataagcaattgataatttactagcaacgcctgcaatcaaaaagcgtttacctgctaaaagtccttgtgtcatgccgatctcactcaaaacaattttcagcataatgccaatattcaacgtttttcgaaattgcataatgcatcttttttcaaaaatcgcacgaaaaaaaatcgctccgatttaggagcgactttttaccaactcatttctagtcgtcagacaataagccaagtaaacgtaagaaagagatatacatccatactaaagttgcaagtaaggcaataccacacaaccattccatgaattttggtgcacgatatgctgcattagtttcgatcaaatcaaaatctaaaattaggttcagtgaagcaatcactgcaacaaaagcagcaaaaccaatacctaaccagttgctttcaaaaatataaggaatgcttgagccaaacgctaaacgcatcaccatctgcacgataaatacaataaagatcgccagagatgcagagatcacaactgatttgaacttttcagttgcgcgtatgatttgaaacttatatagaccaaacatcaccaaagtcgtgacgaaagttgccaataaagcttgaagaggaacgcccggatatttcaactggaaagtaaaagaaataccacctaagaaagccccttcaaataaagcataaggaattgccaaagttggagcagttgttggtttaaaagtcgtaattaaagctaaaaccaagccgccaattgcacccacaattgaagccgcataagcaataccaacatttgcagtaaaggctgcatagaaaaataaagcgacacccactgcggctgcaatgatggtcaacatcacagatttttgaatcgcaccttgcacggtcatcggttgactatagtcactgaccgtttcaacgcgtgtcagtatcgggttattactttgcataaatgctctctttttataataaataaacttaaaacatcattttaagcaaaatgaatatgaaagccaaattcccacttggcattattgtaacaatgtcctttaaacaataaaaaagggagctttcgcccccttttcttcttacttgaataacctaatcaatctttaccgtcagtattcataatgaagaagtattcgcggtaatacttaagctcagaaatagaatcacgaatgtcatccatcgccaaatgtgatgcattttttttcagaccactcataatttcaggacgccagcgttttgagagttcttttactgtagatacgtcaagattacgatagtggaaatactgttctagttcaggcataagacgatgtaagaaacggcgatcctgacaaatcgagttaccacacattggtgaaacttttggatttacccatttttttagaaattctaaagtctgtaactcagcatcacgagctgtcaatttactacgacgaactcgttcaattaaacctgactggccgtgctgacgcgtattccactcatccattgcatttaaaatacgatcaggttgatgaatagccaaaaccggaccttcggcaagtacatttaaatgatcatctgtaataattgttgcaatttcaataatctggtcgttgtcggtatctaaacctgtcatttccagatcaatccaaattaatcgtgtatttaaagtactgctcatgaatgtacgttctaaagtgccgtaaaaacatcaatagtagcaaatttcttgcttctgcgctgtaattccataccagcttcgtgctatttttgcggtcttcaaacaatggtttttttgggatatgaatggctctaattcgtaagcgtcgtttaactgagcaacagcaacgtcgtattgaaaaacagcataaaactcgccaagaagaagtcgatacttcacaagatctagatgggctggttgtacagcactatggacgtcaacttgaagtacaggcactttctgtacccgatcatcacccagaaaaaccgcaagtcgccgaaggcgaaccagaaccgttttggaaacccattgaattaaatagcgtttggcgctgtcacacccgtacaaaccttgaattactggtcactggtgaccgagtgaagtggcaagctgaccctaatacaggtttagggattattaccgcaattcatccacgtacttcattacttacacgcccggatcgctatcacaaagtaaaacctgtagctgcgaatatcagcttaatcgttattgtttttgccccactgccagaaccggcacctactttgattgaccgctacttagtggcatgtgcagatgcgaatattccggctcttttagtgcttaataaatcagatttactcactgaaaatgatccgattctcgacatgctcaaagagtatgaaaatttaggctatgaagtcatgatttgtcattctaaaggtgacatctcagcattgtcccagcgtcttgatggcgagacagtagcttttgtaggtcagtcaggagttgggaaaagctcacttattaatgtgctcattccagatgctgaacaaaaaaccaatatcatttctgaaaactcagcacttggacagcacaccacgacttctactcgtttaatcaactttggtagaaatggcgccttgattgattcaccgggaattcgcgagtttgggctttggcatctcgatttagataaaattcgtatgggcttccctgaaatcgaagcacatttaggttcgtgtcagttccgtaattgcactcatactcatgaaaagaactgtggcttaaaacaagctgttgaagcaggtgaaattttaccacgccgcctagacagctttttacgtttaatcgatgagattcaagaagcgcagcaaaaaaactaattttctaccccatttgcccttgaagtggtgattttgatcaccatctatatacgctatactctaggtcaattttgtttttaatttttttaggtgacttgtggaacgctggttagagtttatggggaatcaccccattttgtttggtacactcggagtcttgatcgtattgttcttcatttttgaaggtcaacgtaacggtcgtaaaatttctccacagtcgcttggtattttagtgaaagcgaaaaatgcccttttgattgacttacgcgatagcaaagacttccgcgaaggtcacattagtggtagccgcaatattccttatagccaaattgcaagtcatgctgatgaattaaaagcaagtgaccgtccattggtatttatttgcaacctagggcaagttgctggtagcgctttacagaaagtcgctcaccatgacagctatcgccttgatggtggtatcagtaactggaaagctcaaggcttacctctcgttaaaagcaaaccaaaagcttaaggagaattgttatggcagcaaatgtcattgtttactcaacttctgtatgcccgtactgcgttcgcgctaaacaattacttgagcgtaaaggtgttgcttacaaagaagtaaatctttctgttgaagcgccagaagtacgtgctgaattaatgcaacgtacaaatcatcgcactgttccacaaatttttattaatgatcagtttatcggtggttttgaccaactttatgctttagagcgtgaaggtaaactcgacgaattattggcttaacatcgcatccatattaaggaaaaaacaatgagcgaagaacaacaagttcaaccacaattagctttagagcgtatttatacaaaagatatttcttttgaggttccaggggcacaagttttcactaaacaatggcaacctgaacttaacatcaatctttcttcagctgctgaaaagattgacccaactcactttgaagtatctttaaaagttgtggttcaagccaataacgacaatgaaacagcgttcatcgtagatgtaactcaatctggtattttcttaatcgataatatcgaagaagaccgtttaccttacattttgggtgcatactgcccgaacattttgtttccgttcttacgtgaagcggtaaacgacctagtaacaaaaggtagcttcccacagttacttcttactccaatcaactttgatgcagagttcgaagcaaacatgcaacgtgctcaagctgctgctgttgaaggtcaagcttaattttatagcttaccctaaactcaaaaaaccgcgtaattcgcggttttttttatgagagtaatttagatttaacggtcaagtgaatgaatctgaatagaaggaaactggaatccacggcatgattgttctgaacgccatgcgactgttaagatcatattacctaacacaaagttttggtaggcaaatgtcccaatgagctcatgcgaacataatccgccatgatttgtaggatgtgcttgggtgtttaaggtatttaaatctaaacgtataccaagacccgatgcttttaaaacagcttctttagtcgtccagactttaaaccaatattccctatcttgttctagactttgccacgttgcatattcatcaggatgaaaagcatgttgtgccagactatccagacgtactttacgatcaagctcttcaacatctacgccaatatctttaacatgttcgctcatggctaaagcgtagtattgttggctatgtgagtgattaaaatgcaaagtgtgattcaataaataaggtttaccatgttcatgcttggcaaactccaattccgttgaattgaattgtagtttctctgcaatcagtcgatttctgacactctgtatttgttgttttttataatgattaaatgaacggaagtctggaaaatcttgtttagactttaaaagaagctgagataatgcctgtgtatagacttcaattttgcgcttagacattatctcgaccttatttaaaattaattaaaatttaaccacgtcgccttttaatgccacacccgccatcatggcgcctttatagcaatcgtaagtggtcgtactcgttgtttcattggctttaaaatagctcacaatattggtaacggcgtttgccccttgtgctttagcattgttttgcatttggatcagtgctgaacgtaaaacccagtcacaagaagttgctgctgacttaccaaaaccattggtctttttattggttaccgcatctttttgaatgattttaccgccagactttgtaccctttaaataaaactttactgaaccatctaaagtcccatctgcaactgcacggtctacagcttctttaaaatttaactgatgtacttcatctccagcctgaacagtggcagtaaaacccgcacttagcattgctacaaataaaagttttttatttaacattgttgtgttccttattgtttaacacgtttaaaaataagcgaagtattaattccgccaaaagcaaagttattgctcataataatgtcagcatccaaatttctcggctgctgaacgatataatctagttcaccacatagtgagtcgatttcatctagatttaaagttggaataaaacggccacgattcatcatttcgatgcttaaccaagcttcaatagccccacacgcccccagcgtatgtccaaaataactctttaaagagctaattggtttatagcctaaaacttttgcagtggcttggctctccgccacatccccctgatctgttgaagtaccatgtgcatttacgtaggcaatgtctttagcttctacagatgcatctttaagcgctaactccatacagcgccccatcatttctgattcaggacgagttacatgttgaccatcggtattactaccatagccaatcacttctgcataaatatgggcacctcgtgctttggcatgttcatattcttccagaattaaacagcctgcgccttcaccaatcaccaatccatctcgtttagcatcaaatggtcgtggtgttttttcaggttgatcattcattccactggtcgcgaacaatacatcaaaaactgccgcacctgccgcactgagttcctctgcaccacccgcaatcatgacctgttgcttaccatatttgattgcttcatacgcttgcccaattgccatggaaccagaggtacacgcgcttgaggtaggtaaagttaatccttttaggccaaaatatacggtcatgttcaccgcactggtgtgggccatcatgcgaatataagtggttgcattaatcttactcatgctctggtgaagcaacatgcttgcaaactcacccacggcatctacgctacccgcagaagacccaaaggcaacacccgcttcgccactagataaaatttcatgtccaagcaaaccagcattttgtaacgcagtttcggcacaaaccacagacatgagtgctacacgccccataccacgggtaaccttacggttaaaatgttttggaatatgaaatgtttcaacaggcccagcaagcttggtccgaaggtcaacatattgctcccactccggcatgtaacgtataccgcttttgccggcttcaaatcgcgcaaagatgtcatcggcagtttcacctaaagaggtaattcctgccattcctgtcacaactacacgtttcatcagatgagtcctccattcacagagatcacctgtcgagttacatatgaagcttcatctgaacacaagaatttcactacgctcgccacttcatcaacctgtcccatgcgttgcagcggaatcattttaagcgcatgttctttgacttcatctgtcaccatttcggtttcgatcagtccaggagctacacagttcacagtaatttttcgcttcgccaattcgagtgctaaggctttggtcgcaccaatcagacctgcttttgcagcactatagttaacctgaccacggttacccataattccagacacagaagataaagtgacaatacggccacctttgcgtaagtgaatcattggcatgatgagtggttttaaaacattatagaaaccatctaaagaggtcgaaatcacttcatcccaatcttgatctgttaacgcaggaaaggccccatcatgagtaagacctgcattcaatacaaccccatagaatccgccatgctgctctacatcttgctctaaaatctgttgaaccgtctggcgttcatttacatcaaacattagataatggctattttgtcctaatgcttgaatctcttgtacgacttgctcagcctctgcctgacgtgaacgcgcgtgcacagttacatcaaaaccagcctttgccagctgtaatgcaatcgctttcccaattcctcgacttgaacccgttactaaaattcgtcttgtcacaatgtattcctaattctttgtggttattcaaatggtgattctgttggttcaaatacacttaacgttgcctgaatgcagtgctcagcatattgaatttcacaggaaaattgcccaagtccttcatgaaaatattgttgctctatttggatgatcaattgtgaacctaaggagaaataagggatgggtaaatttaatttacgtgttcccaataaaaaaccgacttttggtgcttgttttgactgctgaccttgccagcctgaataagcactaattgtttgtgccataatttcaatgcttgcccatgtcggcaatccttccgcttcacaaaacatgagctctggtgtaatcgtgagttctgcttgtgcccgcccttctgcaacctctgttaaatggtcaataaataccatcggttgctcatgaggaatatattgaattgcatccagtttcattagggcttcactccaaaaacaagactaatattacttcccccaaaagcgaaagaattactcatgacataacgaatgggctgtgttaactcggcttcttgcacatagttttggtcgaccaaatctggatcaatctcaacattttgatgtaaaggcaaccagctttgatcttttaaaacttgctcacaaataaaagcttctatggcacccgctgcaccgagacaatgtccagttttatgttttgtactacttaaagcaacttggtaaacaccaaaaacttgtcttacagccttaatttccattgcatcattttgtggagttgcggttccatgcaagttgatataacccacctcttgagctgaaatatgtgccatatctagtgcacgttgcatggctaaagcggcacctttaccttccggatgtggagccgaaatatgccatgcatccatggtctcacccgcccccattaacatgacaggtgcttgttctttacttagtacaaaaaacgcagcggcttcaccaatattaataccatcacggcttatgccgcagggttggcaaatatgtgcagataaactttctagactattaaatccatttagagtcaatttgcacaaggtatcgacgccacccaccagcacaacatctgctaagtctgcgtgaagtaatctctgccctgcggctaatgctttagcgcttgaagaacaagctgttgaaatcgtatatgcaggcccttcccatcctaagtactgctgtaatgctttcgctaaacagctcatttcttgaggatagtgtgatatcgatagatctgtttgcccttgaaaatattgcttaagtaataattcattatctgcaataccagaagtagaggtgcctaccacaatggctaaacgtttattttcaaaggaagcagtataagcttttaactctgtttcgattttagataatgcagttaaggcaaaacgtagattacgtgaatctacagaccgcatagcatcaggtacgctcgaacataatggatgcgtatattgccccacccaaacatcacgatcagcgattaaatcatctcgcaaactcaaggtttgctgcggctgttgtaatgcctgtttaatttgattaagttcgcagcctaatgcagataaaccaacactaaattgtatgcctactgccattggagctgcattttctgaaggtaaatgtttcatggcgtaggactttcttctgtctgcaaggtgttctcaatcgaactcagcatcatggtataagggacttgttcattaatcaattcaatacttccttgtccctgtttaagctgtaacacaggctgcttttcaatataaacaacttgcttatctgcttgttgtttcatctctacagcttgttgccctaaatgcgaaaactgagggtatgtcgcaaacaaaagatcacgtaccacaaactcaaaaggcaataaacgcatctgatcaatgcgttgttcaacatgaactcggtgcccatcaaactgtaacttaaataattgctggcctgtcaggcttaaagcgaccatatccagtacagcgcccttttgctgttgatataacaagaagctaaaactttgctgcttccactggacctcaacctgatcttgtctttgataagtctgagcctgccatagtggactttgtagccctttggcatgtggcatgatttgacaaccatttaaaaatatcaagctactgagtaatatcgttgcccatttgcgttgcatggttatccctcaagtacctgttcttgcgccaagccttcacgacaatattctgccaaagtgctgagtctacgtttggcatttttatggatcgggtttttttcatcccacgcataaccagccaataatgaagaaatcatacggcgaatgccttcattctgattttgcgaaaacaccacatcttggaactcatcttcgtaccatgattcaacataggcacgaaacacctgaataccacggcgtaatggtttttcatattcttctaaccagtcgacttgctgaccttgcaaaactcgttcaaccaaaggaaccgccaaacttgaagatttaagagcaatcgtcacacctgatgaaaagactggatcaagaaactcacccgcattacctaatagcgcatagttgtgacctgccaaatgttttacattcgctgagtagcccaccaaggtccgcactggcgtatcaaactttgcacggcgcaagacatgtgacaagcttggttcatcggccaaaatacgcttaaacattgcctcaggttcattatcttcagcattttcgaccatgtatttgtcaaaaaaatcttgttctgcaacaacaccaaaagaagctcgtccatctgcaaatggaatcagccaataccatgcacgatgatctttttcatggacagtaattaaaattttattacgatcaaactctgggtcatctgtaattccgtcttcaatatgggtaaacagcgcacgtcttaccggaaaatttgatggactttctagatctagtaactttggcaaaattcgtccaaagccactcgcatctaacaagaatttagtttgaattttataacgttgttgttctttatctaatacagttaatacaggctgttcagatgcaacatcaacatctaaaacctcatgcccaaagcgaatatccgcaccataagcttgagcctgttttgctaataagtcgtcaaaatctgcacggcgaacttgccaagttgtgcctggaccatcggtaaatttttctgtaaagtcataaaaactacgctgtttgccacgtaaaaaagccgcaccatttttaaattgaaaagcgtattgttcaacatgttcacggactgtttctaataaaccagcttcttctaaaaataccatagattgtggtagcaatgactcaccaatcgaaaaacgagggaaatgctgtttttcaatgatcgtaacggtatagcccttttttcgaagaagtgcagcagcagaactacctgatggcccagccccaataatcacgacgtcaattttttctatagtgctcatagcacaacttcctttttaatttattcaaattatgaatggtcttgtaaattcacgatatgtttttcatctgcgggggttaacaaagtcgcatagataaacgagaaaataaccccgaataaaaccgttaaaccaaaacaatgaattgcataagtatggctaaatgaaagtaatccaaagccaagtaaggtcgacatcatacataaaaataatgccattccaactacttgagggtgatcatgtccatgtcggtagaaaattgcatagtcgacaccaatcccaataatcagaaaagtcgccataatactaaacaggttaatctcgacacctaaccatgcctgaacagcaaaagtgcttagtaaagccaagctgactggcaagaccaaaggtacaatcgaacttaatccataaataagcgctaaaccaactgccagaccaattaaggcataaatcagaagatgttgagcctgcactcgatgttcagcaaacatttgtgacattgcagtaatcggttgctggaaatgtatatgctcattctgaagttgctttaacgcgtcaggttgtttcacccctgtcaccataactaatcgctcattggcttgaggttgtaaaaaagctaaagggtgatctttaaatactgaaaaatctaataacggttgtgccgctagttgctgttgccactgtaaaacatcagtgacatttaggcccatactttgtgcatattgctgcaaagtcgcttttggaatatttcttaatagttgtagattattttgctgctctgccaatggtggaacccattgacctaaagcttgaaatgcactgatttttccgtttgtttgcaactgttgtaattgccctatcagttgctgctcttgttgctgcatttcatttgccgatgctgcacgcaccacaaaataatcactactttgttgctggccaaattgctcacgaaccgcttggtcctgcaactttaaactcgcgtccataccttgtaagttacgaatatcatcgttacttttaagatagaaaagactcgacgtaccgactgctaaaatgattgcaatcaagccagaacgaactttggttcgttgctgaaaccataaccgtgcttgtccaatccacgatagtgcttgtatagcaggctgagcattgagtgctggtaatcttggtaatagcagtacactactgatccacgccgcagttaatcctacaattgaaaagaccgcaatctgcttaaatcctggaaatggggtaaaactcaaaaagatgtatgcaactaatgtggtcattaaacccataaacaaacttggtaatagcggttttaaaatttgaaaaccgccaagctttctgtgctgcgattgcatcgccataaaataaaatgaaaaatcaacacaaacaccaatcagacttgcaccgaacactaatgtcatcaggtgaatttcaccaaacacccaatgtgtgactgcaaacgccacaaagcttccagtcgaaactgcaataaactcggtcgccaaaggtcgcaatgagcgaaagccgaaccaaaccagaaaaattaagcccagtgtcgagccaacaccaatggttgagatttcctgtttggccgattgcgtaccaaaatttgaaaataaaatagttccagtccaatgagattttaatcccattgccgctagtttttgcttagtttgttcaatccaagtagaggtctgttcttggtaatcaatattgtatggactttgcgtcaactgtaatacgaaaagccgagaaatgccttgttcatgatgaattgtggcaaagccctgctccatttcaatatcttgttgcgacggggttgccaactgcatggcataacgagggaacaacagtaacgggtcttgcttaagtgactcagcagtgacaggcatgcctggactcatcatctgcatcagactttgttcagtcagcgcagcatagtcctttttttgcaataaggcttgatcttgagtactcaacaaccctgctctatgttgatacaactgttttgcaaattgatcaaaatcaagctgtggtttgagtggctgccatagtgcactttgcttagcttgagcttttaaaaaatgcgtcgcttgttgtatcgcagcctcatctttggcatctaccaccacaaatactttattgttgagttgctcattcatgtactgctgagtacgtgcaagttctgggtcctgctgaactttaggcaataacgcaaaaatattagtttgaatatgaatatctttattcagccacgtcacgccaagccccacagcaaccaatagcagagcaattaaccaaagcgcggtgaacttattttgccagttggaaaatcgcatgctcagcagccgttagagtcgtcggttgagaagtctggtgactaaagcgaatggtcgttaaattattcgctttctcggtaatcacgatttggttaacgtactgttgaccttgagcatcaacacgcacaaataactttttaaacaagctacttttcggagttaagctcatgctccaacccgctggactataattcgcacttaccacattaaaattctttgccaaagcctgttcattaccagacatgagctgtaagaataaagtcgcgaccgaactatatggcgattgatcaacttgtatctggctaaatgtacgctgagttttctgtaccaatttggttggggtaacaatcaaatctgcttgcacaggtcgcttgatttgccacgctacaccataagattttgagaacaacaaagagccgttcgatacaaaagttttattcaacgatggcaattttttttgctgttcgaaatcagcacgaaccgtaggagactgtgataattgctgaaaaatttgaatgatctgtgttggcgctgcatagaccgcacttaaactgctcatccaaacagcagcacctaaacctaaagttttgatgaatttagacatcacgcattcctcttcggttgaaactcagaccatgcattcaagcgatcaaacaaaacctgtggcgattgaaaacacatttcacgagcttcaatattcaccgccacctgtgtggtataacccttggttaaacgtttccctgactcagcatcaaaaatcaaataatcaattttcaaacggttttcccattcttttaaaatggcccgaacccgaatcttttgttcaaactcaataccgtatgcatagcgaacatggctttcaatcacaggccatgcatagcctgattctttcatctgcatatagttgtaatgaaattgatcgagcaatttacagcgcgcaatctcaaaatattttaaatagtgtccatgccaaaccacattcatggtatcgacatcatgaaatggaatttcaatgattacatctgcatgcattggctcaccttatcccataaattctggttgattaaacaattcaagttggtctaaacgattaacaatctgttgtaattcggtttgtaatggtcggtcttcttcgacaaatgcaaagctttgtaaggtccattgcataaacgtttgcaatgttggacttaactgtgtggttaaaccttttaaatgaatcgcctgcacactcgcgcagcaaagtgctgcaatgacttgctgtgtcagggtaatcacacggctcgcatcacgcgcagcaatggtacccatgctgactttgtcttggttatggcattcggttgaacgtgaaaaaattgaagctgccaaagtatttttcaaggcttcagccgtccacgccgacaccccaatttgtaccgctttaaaaccatgattcagtggtaaacgttcagctgtcgcacctgttaaattacgtggcaaaccatgattcattttgtggtcaaccaactgtgcaatttgtctgtccatcaagtcagcaatattagcgatcataattttcaagctatccattgcttgtgcaatgtgcccaccgtaaaaatgaccgccatgcaatacacgcatccctacaggatcaatcaatggattgtcattacttgagttcaactcattttcaatgaactgacgtaaccatacttttgagtcttcaaacacaccaataatatgcggtgcacaacgaagcgaataacggtcttgcaaacgtgggctttgatgtgctgtttgtacttcactattcagccagtcacgtaattgcttggcaatgtgttgctgtcccggatggggcttctgtgcaaacaggacttcatcaaaatgactaggattaccttccaaagccaatacatttagagcagtaattaaagtacttgcaagtgcaatttgctctgcttttttatagtttagacaagcaattgccgtcatcaccgctgtgccgttcatgagcgccaaaccttctttaggtctaagcgttaaaggcagcatatttttttcagcatacacctgagcaactggaacaatttgtccatcgatatagacatcacgctcaccaactaaagttcccgcaatataggacaacggcgttaaatccccacttgccccgactgaaccttcagatggaataactggaattacattttcattcagcaaccaaactaagcgttccagcaaagcgatcgacacgcctgaatagccgcgagctaacgaacataaacgcgtcacaactactgcacgtgcagtgatgacatctaaattttcacctaaaccacaaccatgaaaacgtgaaagatgcagcggtaattcattaacctgatgcaatggcacttcaactaaacatgagtcgccataacccgtagtcacaccgtagataaccccttcctcttcaaggagctgatcgagaaaatcagcgcctttttgaatcagttcacgccattcagacgtttctggtaaagcaacctgacattcgcctctggctacagaaacgacatcttcaatactcagtggctgttcacctacggttaacacacgcatgttatttcgtccaaaaattataaaaattaaaccattgataaggggcacgcagacaatgctgttctagtacggcaacgtatgttttagtgatggtttgcatactttcaatacggttagcacgaggtaaatttatctgctcggcaattgaatgaatatgcacttgaaactgctgctgcacccgatagcaaaacacagcaataacaggcactttgagtaaatttgctaaaatccatgcaccttgtgggaaagctgctgactcccctaaaaaatcaacatgctgtacacgatctgactgcacaggcactcggtctgccgccacaatgacccactcaccttgctgcattttgtcttgcaacagcatggcagtttcaatacctagctcatcaactgataaaaggcaaacatctgccttatcatttatttttttcaaaaactcattaaattttgtcgcgtgcttttggtaaaccagcacattaattttctgcggatgctctgacttaatagctcgaagcaactcaatattgccaaagtgagagacaataatcagagcacctttttgataatgctgagagaagttttcatgtccaaaaacttgcagttcctgttcgggaatattacctagccagccctcaatcttatctaaaatacattcgccaaattgcatgaaatgcgcatagctatttgaccaatttggttggtagttaaacggcgacttcgatccagcaaaatgatgcagtttttgtaaataaagtaaggaagcctgtcttgctgtggtagcaaataaccagtaccacataatgacgaagtacatcaccaacttgcataaccaacgtccaccaaaacggtaaaaccataacatcagcatgagaggtagcatccctcctcgctctttaatgtcattccattttggtgaagctgaatctgtcatagtcaaccttgcagcttttgttttaatagcttcggcaagcgaatcagcatgcccataaacaaagttgcatgcgctttgcttagccctaagttatctcgccaagcatgaaaatgagaaattccttgctctggataaaccacaggtgttggtacattaataaaaggcgtattttcccattttaaacgtactaaaatttcactatcaaaacccatacgtggctgaaatttagcactatttaaaacctttatcgtgctctcaagcggatacacgcgaaacccgcacatgctgtctttaatttcaaaagacaaactgtttaaccagacccaaaaatgggtaatgtaacggccatataagcgctttttaggaatagaggcatcaaaatatggctgaccaattaccattgcatcgggatgctggtgagactgctcaataaattttggaatgtcatcccagcagtgttgaccatccgaatcgagttgtaatgcatggcttaaaccaagctcataggctgcacgtaaaccagtcattacggcttgccccttacccttattcacctcatgttcaattaagtgaatttgagaatattgctctgccaatgcttttaaaatttggctacaagcatcatcactgccatcattgaccaacacaatcggtagatgaaaactgtccagataagaaatcaaatctgctaaataatgtggatgattataaaccggaacaacaaagccgtaattggactgcatttttaatcctctacttctgtttgcaaggcaaataatagtcgccctgaagccagaatatgttctgaatcacgtagttcaaaactcactttatgctcttttcgagcaagcttgagttgtaccacggcatacggacgaatcaggttttgaaattttaactgctcatatccctgacaccagctcaaatcagaccaaattgatttagcaaagtgttgtaaaaagcctatttgcccaaccccaggataaatgggttgtgttgggaaatgccctttaaaacaagccaactcaggtggaaattctaattcccaaatgtgatcatctgaattttgagactgtgacagcaccacgggttgcaacataggcttaaatagagttttcaaatagtttttattgagtttggactgagtattttgtggtaactgacttaagaaccgccactgacgtggaatcgcgatcgtttccaagccgtctttcaactgttgttttaaatggctgacaaaagccgacttaccctgttgctgtaactgttcacgagcttgctctgttagaacaacaatacaacccaacatttggcgttgctcatgttcaaataccaatacatggcattgctttacgacatctaaagcttgaatgctttgctcgatcgcatctaggcttaaacgcttttcttcaagttttacaattcgatctgtacgccccagcagcttaaagatctgacatgttgcatctgtccatgccgcaccgtcacctgtggtaatccagtcattctcataggcatgattactcttgaccataagctgttggtcttcaatacgaatagccacattactaaatgcagtccaagcatcttcatctttagcgcgatgggcaataccaccagtttccgaacttcccaaaacttcaataatcggacgatttagtaaaggacgaacatcactttctagcttgcccccagaactaaagaccatctggcagtgttgtaaaacaacatcggttgtccagcgttttaataaagcaggacttgagatcaaataattgcttaaccccattgtttctaattgtttttgggcttgtaccacatcttcagggaatgccatttgaggattataaaaacttcgacctctagcaagtggtagtagtaatttaaacagtaatccataaatatgttgatgactaactgttgcaatcgcagttgcatgttcatcaaagctaaaactctgactcaacccttggacttcgttaagtaattgtctaagtgttcttggaatttttttaggttccccagttgaacccgaagtataaaaatagagttgagcctgctctaaaaaagtatcatctaaggttaaagataaaggtacaacttctccaatttcttgacgctttaaaaaatagatctgctgtgctgaaaaatcctgttctaattcacgcactcgattgggtggcaaaagtatttgctttttcgctaacaaggcagcaaagaataaaacgagaaattcataactatctgcttcccataaagcccaagttagattttccatttgagcaattgcagcagcttgtaatgccacatcttgccaaaattgattaaaactggtcgagtttagagtaccgtctatacaaagtggctgagctgaatcgatgaatttctgaaaatggcaatacatagtttttaattaatgatttgaagaatgtaaacgctgatgtcgcttacgcaaaataaattcaccaaggaacaaaatgcccatcagcacataagaaataaagccattataaatgacccaaacctgagttgaggtaaaaagcacagtgcttaaagcaatcaatgcattacaaaaaaagaaaacacaccaaactttggtgacctgtctggtccactgtacaccggaagcaggtaaatcaggttcaacgagtcgggcaaagcgctcaatcatagacggcggcttaatgagcgtcagcgcaaaaataattaatgcacctaaactcatacccactggatacagctttagccaagcatggtcatgtgacaacaaactcaggctaccacaaacgatggcaaaacccgttaatggccataataacgagttgcctttgctaaaaagtctgatcacacccaacccgatgagtaaagcactcacccagacaaattggccgtgactcaaactccagcccacaataaagggatacagcacaaaaagtgccgtcattatccctttaagaataaacttcattcagcagtcatgttctgaataaccgtcaccacatcaagtacggttctcacatttttaaagtcttcaggttttacttgcttacctgttaactctttaatttttacaactaaatcaaccgcatcaatactgtctacatcaaggtctgaataaaggttcgaatcgagttgaacagtctctggttcaatttcaaacaaatcttccatccattcgcggagtttagttaatacttgctcttgagataacatcatcatgctccttatgacttctgttgtgcttcaactaaagcaaccaagctctggattgacttaaaatgctgtttagtttcatccgattctgcatttaaatgaatgttgtaacgctttttcaaagccagtcccaactcaagtgcatcaatcgagtctaatcctaaaccttctccaaataatggagcttctgtatcaatatcggcaatagtaatatcttctagtgctagaacatcaataatcatttgctttagttcatcagcaagattgctcatttcaagataactcttcatcaaaaattttataaaaactacgacttaactgacgaacttgtttaggtcctactgttaaatcatctaacagatctgatacttgcacagcatctaataccttgacctcaatatgaaatggttgagatggtacgtggtaccatttttcattcttggttaaagttgatggtgtacaagtaataattactgggcgaattggtacatttgcacgaatggcaatattggctgcgcctcgctgaaactcgtttaaggtcatccctttttcagtgcgcgttccttccggaaaaattaaaagagaggccgcattattttcttttagacgctttacacagtcttcaacaaactgctgagaacctgcatttaaaatatagcctgcgctttgtacgggtcctttggtaaatgggttcgaccaaagagactgcttcacgacacaattagcctgctgcatcataccaattagtactacaacatcaatcaaagtcggatgattggcaatcaccagctcttggcgactattttgtagtttttccagcccctctaccgaataagtcatgatgccgagtttgaccatcatgtcagtaaagcctttgaaactatgtttaatcacattttgcgcacgttgctgtcgcttttgcggatcagaagtggttgcattgagtacaggtgcaatcactgaggcaatggctataccacctagcccaaaactggcaaagctaaagccagtagcagccacacgccagcaataattacttttttgcttgagatttttaagatttagcatttgttccacccaaatgcagatgttaactggtcagcatcctgccaaaaatgagcaaaagcaggagcatctgcttcatctgtatgcgtccacgcagtaatttgtaaattaggttgctctagagtaacgacagcagccatcgcataggcaggaaaattgatcgcctcagcataaatattaggtaatggctcatcataggcgacgactaagacccgcttaatctcaggcattgactttaaaagtgcataagcctcaatcaaaccttcagtccatgaacagcttaagcttgtagagggagtatcatcctgacataaaatcgagtagaggcccgaaattgcattatgaacagacgttgaaaattgtgttggcgatggagtttgatcatttaaaacgtcttgcaagatatttaacgtttttgcctcatcaccatattttgatacccaaacaatatagtctgcacttcttccatctaaactactaattgcagtatttaatgctaatttagctaaaggtgacagacgtctcctttgcatggctggaatacactcaagtgccgcataagaaggttgggcatgtgtaagcgttaaatgagcaagatgtagtgttaccatgctaaaaaagaaccttaagcagcattattctttcggaatatagattattttataaaaaaacggattatagcattcgttataaaatttacaaaaaattacgtttatcactcacactttttcataaatcttttttcaccttaattctttgtaaaaaaaagcccaaagaagactttggactttttcaattaaaaacagattaacgtttaaatttcttttctgcttttttgaatttctgaatataacgacgacgacgtgcagctgtacgttcatcgacctgactcttacgaccttcaaacgggttttcagaagtcttaaattcaattttaactggtgtaccttcaagcttataaaccttacggaacacattctctaaataacggcggtaatctgcaggagtcttatccaccttgttaccgtgaatcacgatagtcggtggattttgtccacccatgtgcgcataacgcattttaatacgacgaccttgaactgtcggcggctgatgctgatcagttgcatcattcaaaatttgtgtcaatttcgcaggagatacctttaagtttgcagactcataagcacggtgaattgatggatataactcacccaccccagtaccatgtagagcagaaataaggtgaattcgagcccaaggaataaagtcaaaacggcgctcaacatcaagcttacactgcttgcggtcgtattcactcatgttgtcccatttattgatcgcaatgaccatggcacgcccagcttccagcgcatagccaattaaatgtaagtcttgctcaacaataccttcacgggcgtcaactacaaccaccaccacatgtgcgtctttcatcgcttgtaaagtcttcacaattgagaatttctcaatcatttcatcaactttacctttacggcgtacacctgctgtatcaattaaagtgtatttacgaccttcacgctcgaacggaatataaatagagtcacgagttgtacccggttggtcaaacgctaccacacggtcttcaccaagtaagcggtttactaacgttgatttacccacgttcggacgaccaataattgctagacgcaatccggtatctttatcatgctcttcaggattttcatcttctggaatatcttgaagtacatcctcaagcatttgttgtacgccacggccatggctcgctgcaacttgtaatggttcacccataccaagcttgtagaactcaaccaaagcagcttcagcatgaacaccatcaaccttattggcaacaagataaattttcttgcctaaagtacgtaattcacgggcaatttgctcatcggaagctaacaatccggcacgcgcatcaactacaaaaataataatatctgcttcattgatggctgttttcgactgctcggccatgtagttatcgataccgccttcactttcaccaataccgccagtatcaacaacaatgaaagacttattttgataagtcgcatcaccatatttacggtcacgagtcaaacccgcgaagtcggctacaagtgcatcacgactcttggtaatctggttaaataacgttgattttccgacattcggacgaccaatgagcgcaataacgggtttcatacaataaccttaattcaagaccagccatatctcatggcatgagcattagaaacagtacaggagatatattttaaggtcagatatgaccataataaaagacggggctttgaactgatttaattcaaacaccccgatatttttaacagcgtaatttgttaagcggctattttagcacaagcgaacaaaattaacgattctgccaaatacttaaatcgccttttcgggtcgaaacatagagctgattctcaatcacacgtaatgtattgacctcaccacttgttttagaacgaccaatcaacttacctgttgtcgggtcgattaagtgtaaaacaccatccaaatcaccaacaataaggtccgatcccaacacgacaggattacttaaatgacgatttaagagactatcattttgccaaagctgttcgcctgttgttaagtcataagcagtaagcttgccgtcagttgacgaaacaaacactttattatcataaacttctggacgcttggtgctacttgaatcttcactccaaaccacacgttgagaagcaagatcagtaacagttacttgcccttggaaactagtcgttaccatgagttgacccgcaacaaccggatcaccatcaatgtcaattaaacgctgaatatctgaacgcccttcacttactgcaacacggcgttggaagcgcggaataccactaatcgtatcaattgcataaacatatgcatttgcagaagcaattaaaaccgtgcgagggtcaagactcactggcgatggttgaccacgtaaactgaactgaacatttggcaatttatatgcccaaacttgttgtcctgatgatacatcatgtgcaaatacagtaccgtcatttgcaattgtaatcacgcggccagactgaactaaagaaggacttaataaagcaccggataattgtgcagtccatttttgttcacccgttgcctgatctaaagcaaataactgacctttactgttaccaacaacaacaataccttcagctgcttcaacaccagagcttaagcccaatttactaacttttttctcccaaagacgttgtttaccacggtatgcagcaacttcacctttaggatcaagggtaaaaacaacaccttcgctagcatcaagttgtaaacgtaatggatctgccttattcgtagaagaaacactgcgtgaaaacacgggcaccaaactcttatttgactcagtcaatttcggtagtggatttggttttgcttcttttactttgttgctagaacatccgaccaatacagccgatgcgattgcaattgccaaaggcagtttgaatttctgattcattaagactcttccacctgtgtttccaaaattgggcgctcaatctgtggatcttcaactaaaacgccaacactttcgagtttaatttgtaaaatttgtcgctcttgtttacgttccagtaacgaatcccatgcagcttgatatgcttttttagcagaatcaatatctttcttagcaacaaagatatcaccacgtaactcttctactgttgctttaaatgccggatcgacatcaccagacaaggtttttagagcttcatcatatttgttttgcgccaattgtgcatctgctaaacgcaattttacaacctgaatcagtccttcatcttttacttttgaattctcaacttttttcaaagctttttcagcagcagcataatcttgtttttcatatgcaagttttgccaatacaaattgagtttgtatcgcctgaactgaatcaatatcgtcttttacaatcttatctgccgaagctgttattgaagctaaagcatttggattatcggctgttgcattcgcctcatccattaactgctgtacttttgcagtttctgtctgactcgttgcaaggtttcttttttgccaatattcccacccgaaaaaggcaatcaatgcaatgagaatcccgctaatcatggcagaaccatattttttggcgaacgactttaagctgtcgaattgttcttcatcacttaagctcatgtgattgtccttttccagatgtttcagtttattttgtaaatttttcaattaagaatggtacaagttcagccaatgcaacttgtgattgctcagctgttgccaactcttttacagcaagctgctgtgcttcccactcacgttcacccaaaattatggcgtaaacagccccagcctgatcagcttttttcatctgactcttcatgctgccttgtgaaccagttttaatgcggatgttactattcgcagcttctaattggtcacgtaattgttctgccaaaactaatgctttagattgataagcaggctctgcaaccaagaaagcttcacagtcacgtacaatttcagcttgttcgacttgctcaattagaagcaataaacgctccattcccatgccaaaaccaacggcaggtacagactgatctgcttttccttttaactggccaaccagaccatcataacgtccacctccgcacactgtaccttgcgaaccaagtgcagttgttgtccattcaaaaacagttttattgtaataatctagaccacgtaccaatttttgattaattacaaatttaatgcctgcagcagtcaaataatcttgtaattgttggaagtggcttaaactgtcttcttttaagaagtcatataacttcggcgcattttccagaattttctgagtcgattcaattttagaatctaaaatacgtaatgggtttgttgttaaacggcgctgtgaatcttcatccaaagcatctttatgttcattcaagaacgcaaccaaagcattacgatattccgtacgctcttctttttcacctaaagtattcagctcaagttgaaccatatgtgcaacgcccatacgcttccataaccgagctgtcattaagataacttcagcttcaatatcaggagtcgctacaccaaaagtttccacgccaaactggtggaattggcggtaacggcctttttgtggtttttcataacggaacataggccccatataccacacacgtggcgtagcaccacgcaacaaattatgttcaaccaacgcacggacacaacccgctgttccttccggacgtaaagtcagtgactcaggtgggtttcctttatcgaagaatgtgtacatttctttttctacgatatcagttgcatcaccaatagcacgtttaaacagtcccgtttgttcaacgatcggcaaacgaatttgttggtaaccataagcatccattaaagatgctaaatgctgctcgagacgtctccacgctgctgtttgcgttggtaaaacgtcattaaaacctttgattgcgacaattgaactcatgatgaactacgaataatttctttagatttagcttcttcaagctcttgaacacgttgacgaaccatagtttcgatttcatcaaccaattgattggtatcaattaaatggcttttctcaccattacgataaaccaatgaacgaggcgcagccccaacgaccccgatatctgcttcttttgcttcacctgggccatttaccttacagccaataaccgaaacgtccattggtgtacggatatcttctaaacgctcttctaaagcctgcatcacctgaatcacgttaaattcttggcgagaacaacttggacaagcaataaagttgataccgttagaacgtaggccaagcgattttaagatatcaaaaccgatcttgatttcatcttcaggttcagcagcaagcgaaatacgcatcgtatcgccaatgccttccattaataacccaccaagagcaatcgctgatttcacagtacctgtacggtaaataccagcctcggttacacccaagtgcaatggattatcaatttgttgtgaaagcaaacgataagcatccatggttaaaaacacattcgatgcttttacgctgactttaaactcatggaagtcaagacggtctaaaatatcaatatgacgtaaagctgactcaagaagtgcctgccctgtaggctcgccatattttttctgtaaatctttttctagagaacccgcattgacgccaatacgcatagaaataccgtgatgacgtgccgcagccacaacttcacgaactttctggtctgaaccgatattgcccgggttaatacgcaagcagtccgcaccataatccgcaactgccaaagcaattctatggtcaaaatggatatcagcaactaatggaactgaaacacgcttacggattgcaccaaaggcttcagcagcttccatagagggcactgaaacacgcataatatctgcacctgcatcaacacaacgctcaatctgagccacagttgcgtcaacatcgcaagtttcggtatttgtcatactttgcacactaataggtgcatcgccaccgacatagaccgaaccaacacggattttacgtgttggtcgacgtttaattgggttctctatcattgtatcgctcaactcatggtattagcgggataaacggaattcagctttaccgtttaccgtatatggagacaatgaaatctgttcttggtttagacttaatgacacagccgttgcatcatcaagacgaatctggaatggagactcaccatttaaggttaaagtcgatgcctgacgacccgtcgctaaaaccttccctgttgcatctacaatatgaacagaagttggacggttaaagtttaacaccaattggtcacccgctgttgcagaggtgttccctttcataggtaaaacttcaacattagactgatttgcttttggcagctcagcatctcctttgtttgaggtccatttttggacacccatcacaattaatgacacgacagcaataatcaaaattgcaagcagtgcgcgctttaaccattttttgttacgatcactattagaacccggtaatttacccatgattttaattggtgagttgtttaaagcatgatttggcaaaagcccagtatcgtttgcataaatctcatcaaaacgctggataattgcagttgcatcagtatttaaatacttcgcataagaacgataatagcctttgataaaagtcgcttctggcaaagatttatagtcgtcttgctctaacgcattgagcgttttcagcggcatatttaaatctgaagatacttgctctaattcttttttctgagaaacacgaatttgacgtaaatactcaccaggacgttgaatatttcctaaagcagaagtcggtaagcttgagccagttggctgctgtgaattaggatttatttccatacggcctcagtactatactgtaattgcaaataacgttgatattctggactttccgggaataaagcacgtaactggtttactaaaacttgcattcccattttatccgcattggctcgagccactcttaaaccaatccaaagtgcgcgtgcaccctgatttttctgccccactgtacgaacatattgttcatacatttgtgtagcagccggaatctgctgctgcaaataaaaaatttctgctaactctaacattgaaatgtaagagtcgcggttagcaagaagtgcttgtttgaatgttttttcagcactcgcaatatcgcctagttttaaataaattcgccccagattttctaaggcctggtaacgttgatcatagcctaatgttgcaccagcaatacgaaattgctcaatagcatcattataacgctccatttggtacaaatacgtaccataattattacgtgcctgagcattgtctggttcagatgaaattgcacgcttaaagtaatgttctgctttttctaaattgggtttactgccttcttgttgcaataaaatacccatcatcatatttgccgttgcatcacgactatcgacacttaacgcttggtcaagagaacgctttgcagaatccaagtcaccagaacgaatgtattcggcagcaagctgcgtacgcacttttactgctttttccgggtcctttttaaccgtttgcgaagtctgacaaccacttgtcaaaagtgcaacagcaacccccatacataacatgatcttcaacttcggagtactcaaagtctgccctcaatattatccttgtgtacgtaaaatctcttgtcgttgagccactttcttttgccactgctcagcacgacgcgtacggtcagcaacttggccgaccaattgtccacatgcggcatcaatatcatcgccacgtgtttgacgaatcgtacacacaaatcctgcatcagacaaagttttttggaaagagatgatacgatttcgacttgagcgtccatatggcgcatgagggaacggattaaatggaatcaagttaattttacttggtaagtttttaagtaatttaagcaactgctgtgcatgttcaggttggtcgttcacaccttctaacatgacatattcaatggtcacatgtttacgcgcgctttcattaccatcttttgcaatataacgctgacatgccgcaatcaactgagccaatggatattttttattaataggcacaagttcattgcgcaattcatcatttggcgcatgtagggaaattgctaaagcaacatcaatatcttttgcaagttgatcaatttttggcacaacacctgacgttgacaaagtcacacgtcgttttgacataccataagcaaagtcatcgagcataatgtgcattgagcttaatacggcatcgtagttgagcaatggctcacccatacccatcatcacgacattggtcactgaacgctcgcgctcagcaacaggcacttcttccatataggaatagtttgccatccaaagttgcccaataatttcatctggggttaaatcacgctgaaaaccttgcttacctgttgaacaaaatgagcagtccaatgcacaacctacttgtgaagaaatacacaaagttttgcgtgaacctgttttatcttcggcaggaattaatacagtttctactaaagagccagaaccttcacctacgcgaaacacccatttacgtgttccgtcttttgaataatgacggtgtaccacttcaggggctttaatttcacaaatttgttcaagctttgcacgtaatttacctgaaatattggtcatttcagcaaaatcagtaacaaagtattgatgaatccatttcataacctgaccggcacgaaactttttctcaccaatatcttcaaagaatttttctaattcagcacgtgacatgccgagtaaattcactttttcggcagcaggcgatgctggcgtggacgaagattgctgctgtccatcaagattttcagatgaaacgaccactgcagaactcatgtgtatttacctaaaccatgtcaaaaaaagaatatattgttcaagaatcaaacaatatgctcttgagagaataaaaaaaccagataagtagtataccacttatctggtttgaatgctttcgattaacgagtgcgtgggcagatctcgttgtcagcaaagaagtaagcaatttcacgctctgcagaagcaactgagtcagaaccgtgagcagcattttcatcgatgcttacagcgaaatcagcacggatagtaccaggagccgcttctttagggtttgtagcacctaagatttcacggtgagcaagaactgcgttttcaccttcaagaacagatacaacaactggaccagaagtcatgaatgcaactaagtcaccaaagaaaccgcgttctttgtgctctgcatagaaaccttcagcatcagcttgagaaaggtgtttcattttagtcgcaacaatttttaaacccgctttttcgaaacgagcaaaaatttcaccgatgtggtttttagacacagcatctggctttacgatagacaaagtacgttcaattgccatgagtggctcctttattttaagatttaaactttaaaaaatttgccgcattataccgatgtcataggcaataatcagctttgaatgtgtaaaagttgcgattttttctactgtttttagcgaacttcatccaaccaagccatctggatggcttctagcaatccttcggttgatttatttgggtcatcactgaagtctggtaacgcacaaacccatgcatgtaaatcggtaaaacgaatccattgcggatcaacttctggatgtgcttctgacaattcaatggcaatatcaatcgtatctgtccaacgtaagcccatagcggctcctatctgtttaatctgctaaatcaagaactgtgtactttagcaaatccacaaacctaatcgatagcttaagctgataaaaattactgttcgttataaagcaatgctcaataatggcgcgacaaaaataatcagacttgctactgctgcaccaataagtgcgcccacaatcacatcactcggatagtgaagtccaagtaccatacgagacaatgccacaagcaccatgaacggcaacatcgctgcaagcaacacaggttggatataccccaacacaattgtcaccatgacagcatgtaacgtatgacctgatggaaaactaaagtgatcgagtggtctttcaccgagaacaatcacctgatgtacttggtaaggacgtggacgcgtggttttatgttttaagaatttataaattgctgttccaaccgaaccaccaagtagcaaatagataatttgcaagctataggtaatgccctgcattccccatacaatcgccaacatgaggtaccaaaaaggtccgtcaccagcacggctaataattttgaagaataatgccacacgctgtgaatgagagaaattattgagatataagcagcctcgtaaatcgagatcgagtatttttatttttgcattcttaaatttcatggttgttctcctattttaggatacttaggtgaagtccgccgagggttccttcactacctgataaaatgcctgttctaattgctgtaccggaagttgccaaccgctttgctgtactttatgacaggcttgtatgcccatttctctaagttgttgtattgaaggaagctgataaatttgttgtataaaatggttcttatgcccaagtgggcttaaccaaccgtttacgccatgtattaaatactggtgtgcacatgcataatcatacgcgataactggcaaaccgctcgccattgcttccaaaactacgttaccaaacgtttcaacttggcttgcaaatacaaagacatcggcacttgcatatgcgactgccaaatcgtgcccgcgcaaactacccgtaaaaataacatttttcgcctcaggtagtgcttttaatcgagcaagatccgggccatctcccaccacaaccagtttagttttctgttgctgaatgttttgcatagctgcataactctcaacgatcagctggacttctttttccggtgataaacgacctacatacaacatgacacgtgtattggaatcaacgccccattgctggcgtaagctttctgagcgatgttttggtgaaaaacgagtagtatccactcctcgcccaacaacgactagagggcatgtaattccaaaaccgcgtaaagcctcttccgtgtccttgctcggaacacaggtcacctgagtattgttatggaaccagcaaaggtatttttgaatcggcttcaccaaaaaggccaaatcgaagaacctgctaaaatcttgaaacggcgaatgaaagccactagagaccggaatatttttggcttttgcggcttgcatggctgttaaacctaacggtccttcggtcacaatatgtacgacatctggcacaaatttttcaaaagcttttgaaacttttaaatattggggccagccaaattgcaaagttggatattttggaatcgcttgtgacatcaccagacattcttgttctggcaaaaaatcatgacatttggctttttgctcaggtcgaacaagtagaattttatgcccttgtttctgtaaaccttggcatagctgcaacaaagagagtgctacaccattaatttcaggcggccatgtttctgtcacaatcgcaatttttaaacgaggacgaaccaactcgtgaagttggtgcaattcctgagtattagacaaatgctgtttttgtttaaaatagaattggaagctttcaggaagttgctgttgttttaatagtgctgtcgcgtatgagccttgcatagcgccatccatcagtatatttattttcatgcttaaagattaagcagctttcttgacactttgatgataaatgcatgacagtttactgacataaaaattcaaaaagcacgccgagaatagcgtgctttttcataaagcagacaagagaacttaacggttctgcaatttcgcataatccatcaatacattcgcagcttcatttacgaacgtttcttcttctggcaacgcaggacgttgattagctttcattttggcacgagattcagctagagcatctaaagaagcctgatagctttcccagttagggaaaggtttttgacctgttgctatacgacgttcattttcagcatctaaagtttgcttttctaaactcaaaagctctgcacggcgcttatcaatatcaagcacaacttgtttctggtcactcgtaaccttcgcaattgccgtacgtttatttaaatacttaaactgtggatcaacagcaacgcgttgttccgaaagttgagacagcttcgctacatatggctgcactgaaccttcacgcttaaatggtgcagtcggaatcgtatcccacttcaacgcatttttcgatttacgctcaccaaactcttcgttatagatatcaacaagcttaatatctggcactacacctttgttttgtgtactaccaccagttacacggtagaatttacgctgagttaaggttgcttgaccatatgccaaagtatcgagttggacctgagctgtacctttacctgtggttgtactaccaatgataatgccacgctcataatcttgaattgcagcagagtaaatttcacttgcagatgctgatgccaagttcaccaatacagcgagtggacctgtatagatttgctgaccaccatcattgtcttcaaacacacttacgttgccattgccatcacgaatttgcacaactggacctgacttaatcacttgtccgagcatacgtgcaacttcttctaatgaaccacctgggtcattacgcaagtcaataataataccttctacttttttagcttttaatgcctcaaacgcatttgcagtatcttcagaaactgagcgatattgctgaccagcacgacgtgaacgatagtcaaaatagaacgatggaatttcaatcacacctaatagatgctttttaccatcacgtgtcacttcaactgtacgtgaacgaacaccggcatcctcttcttgaatgacatcacgtaccaaagtcacattgcgtgcctgactcattgatgcaccagcaccaagaagcttcaacgttacttttgtgccacgcttaccacgaatcaacccaacaatttccgaactcgaccagccgacaacatcgaccattttgccgccctcttgagcgacaccaacgattcggtctcctgatttcacttgaccagacttacttgcaggaccaccttctacaatagtttcaatcttggtgtaatcttcattaccacgttctgggcgaatcgataccccaataccttcaagctgtaaggttgtttggcgattgagttctatcgcatcaattggcggataatagttactgtgtggatcataagttgccaacattgcatttaatgttttatccaacacatcgtcgcttttcacacgactaattctttcaagctgacgcgtataacgcttagtcaaagtctgagctggcgttaaatcttctgggcctgttaaatcttgaccatcagcaagtgaagggttttcttttaacgccttttgtttcgcctgctcttcttcacggctaattgttaaattgattaactgagaaaccagcattttacgccagtgattttgctgctcagctgacgttttaaaatacggtgctttttcgcgatctacttcaataaaagtatttggctgttttaagttttgtggtttcttcaactcagcaagcatgaactcataaaactgttttaagcgctcacgatattgctggtgaatagcaaatggcccagttaaattccccgcttttaatgaagcaccaaaatttgaaccatagagctttttatagttttgaacttcagcgtctaaaaataatgagtggtccggatcaagactgtctaagtacatatcaagaatacggttagatgtgttcgcatccagacgcatatttaaataatgttggcggtctactaaagttgccagttgacgagccaccaaggcttgctcttgcgttggctggatcgattgagaaacagcagcagtattggttgctgctcttgcttcgttcatcgtatgagagaagaataaaccgccagtcgcgattgctactgcacaagctatagtttgaagtttcataaattcttaatacttccttgggtgttcgtatcttacacgctctgttttcgatatgaactaagcagattcaacatcttaaccaactaaattgtttataccgtgtagttttatcatattctgtactgacaaaatgtagcaaatcattgcaaaattcgcttattgtttttcaatcaaaattcaaatggaaccaatatgattggcgcgttgatgctggacatagccggcacagaacttactcaagaagatattgaactattacaagctccgcaagtcggtggcatgattttatttgcacgaaatattgaatcaccacaacaagtccgtgctttaaccgaccatatgcgccaagttcgcccagatattttgattgctgtcgaccaagaaggtggtcgcgttcaacgtctaaaatctggctttacattattgccagccatgggccgttttggcgagctctatatcactcaacctcaaaaagcacttgaattagctgaacagtgcggctggttaatggcaactgaagttttggctgtggggatcgattttagttttgcgccagttttagatctgaatgcaattagcgatgtaattggtgaccgtggcttctctaaaaatatcgaagatatcgctccacttgctggtgcatttatgcgcggtatgaaaaaagccggcatggcaaataccggtaagcacttccctggtcacggttcggtaaaagccgattcacatgtcgcagccgcaatcgatagccgtagctatgacgaaatttataaccatgacatgcaaagctttatcaagcttatgcctgagctagatgcgctcatgcctgcacatgtaatttacgatcaggttgacccaaatccggcaggtttctcacctttctggattcaagaagtccttcgtaatcgcttgaagtttaatggcgtacttttctccgatgacttaagcatgcaagctgcttgtgtcgctgggggtgcagatgcgcgtattcaagcggctctggcagcaggctgtgatatggggttagtgtgtaatgatcgtagtgcagcatgtacagcactcgatggtattacaaacttagagctaccaaatcaagagcgtttagaacgtatgcgtggtcgaattccacaaatccaagttggtgaaactttatcgcttggaaatgactggcaagctgtcaaaacagccattgaagagtttaagaattcactctaaattctagtgcaagaccatatttgactgataattaaaaaattgtcagtcaaaccacacaaaaacaataaatcgagttcaggacgaatgacacaacacctttcaaaacaccgccacatttcttttacagctcactatacaggctatatctggtatcaaatggggatctcacatgaagcacttgccaccagtaaaggcaaatcactggcatatttaattcacccattagagtcttgggcagagaaatatgtgggaggcagcatgcgcacgacgcttaaacagcgccataccatgcttgatcatgatttagagaagttaattcaagaaaaccctgatttacaggtgcttgaaattgcttgtggtttatcacctcgtggctggtggtttaggcagcattatccttccattagctatcgagagcttgatttgcccgatatggctcatacaaagcaaaatgcattacaacaaattgaaaaaaatgcacctgaagttttatcagtcgatttatttaccgaagcctttgctcaagcattcgaagtgtttgactctaatcgcccactagttgtaatcagtgaaggtttaattaactattttgataaagacttattaaagcaactgatccaatccattgcccactatggtgcttcctttaaaaagcttcattatttaaccgacctgtatcctgaacccgttaaaaacaaacttgcaagtattatctggaacagtagtaaattacttaaacttatgtctcgaagctcatttagttttcattttaagactccactagaagtgaaagacttttttaaagatgcaggctttagtcaagttaacgttgaacaaccgcaaatattctttggacaagtttctaaaaacagcgatgaagagcatttaggggacttagtctggactatccatactcaattaaagtaaaaaaatggaagcctcgtgagttttgaggcttccaaatcataaaagaattaaacgttaagctgcttgtttctggcgagtaatgaagcggcttaaacggtcagcaagttcaaaactaccatgtttaaataaggcacggactccttgttcagtagcttcaaagattaaacactcaatcgaaaaagcgccctcttcatcttctaaatgtaaagccaaatcacgtggatgttcatttacaaactcaagctgtgctacatcatctaatttcaaatacattccaaaaaaagtcacatcaataatcatcactggcacctctgtttcacattcacggtggctcagtttcgttttaggctggagaactggtatacgctcttcacctcggcgttccatgttttgcatttgctcacgcgtcattggaataatgccatccagattttggataggttcacctttcaaaaatgaagtgaacaaactcatagtttctttacggcgctggagctgcggcacatggtcggcgttagcaatcagagcaaattccatatctggacattgcaaagcaaaattggcattttcatgaggcaaagtaaaactatcgtactgccctgctgcgaccagtgtcttacattctggaataggtacatctgttaaacgcaaaaggcgattacagttaatttcataacgttctctttcagtacccgtaaattctgccatttgcctaaaaaataattttttagctgtaggcgacatacgtgttttatctaatttggcatgattcaccaaatataaaattaccgcttgcccaaactcttccatacgattttcttgcatgagtttgagcgactcttccagaatcatccgccagcttttacgggtcttttgcataacacccattaaaatcatacggtccatcaaatctggacgatgataagcaaaacatgaagcaacaactgaacccaacgacattcccattacagaaactttttgaattccgacgatatctagccaacgtcctaacatttccgacaaatcgggaagctctaatgttccagcagaaattccggtatctcgattggtaatttgttgatttgcgcccatagatggcaagtcgattaaaatcaccgggccactttcaaatagttgttcaacacaatatttatacgagttaaaattttgaaaagcaccgccaacaatcacaatcggtgttttgtgaatcgtttgtgggtctgcaatcgccatatattcaattttccaaccgtcaatccatgtggtacgagctggctgtttaaaactatctctatggtagatatcgaaaaacccaaaaccggcataagcttggtttatctccgaatccatttgaataatggaattcatatccttgcttcctccttgctgtaatttttttatgctgcaagagttccttcttgaacacgtaatcttttatgcacaaatctttaaaatttgtatttgtttgtattgcacaataacattctaaacaattgtctgaaatatacgcaatcgctgaattgaccgctcatcctgtttaagccgcgaatagtttgcaaaatatttaaatgtttttttatagcggtcacatttttccaaaaaagccattcattgttccgcatttgactgctactatcgtagtcattggtaaatgattaaaaaatgctatgcaagattcaattgaacaatatatgcaaaaagttgggcaacaagcacgtgatgcttcacgcgtcttaacaagtgcttccacctcacttaaaaatcatgcactctctgctatttatactgctttggaaaacaaccaagcagctatcttggcggcgaatcaaatcgacatggaaaaaggccgtagcaaccagctcgacagcgccttacttgatcgtcttgagcttacgcccgcacgttttaaagggatgttgcaaggtttaaaagatgtgatcgcgcttgtcgatccaattggggaaatcacggatcttgcatatcgccccacaggcattcaaattgggaaaatgcgtgtacctctaggtgtcgttggtatgatttacgaatcacgtccaaatgtcacacttgaagctgcatctttagcaattaaatcgggcaatgccattattttacgtggtggctcagaagcacttgagtcaaataaagcaatcgcagaagcggtgaagcatggcttaaaagttgctggtttacctgagcactcagtacaagtgattgaaacttctgaccgcgcagcggttggtcacctcattactatggctgaatatgttgatgtcattgttccacgtggtggtaaaagcttaattgagcgtgtaaccaacgaagctcgtattcctgtgattaagcatcttgatggtaactgtcatgtgtttgtagaagctcaagcagacttacaaaaagcgttaccaattaccttgaatgctaaaacacatcgttacggcgtttgtaatgcaatggaaactctgctcgttgatgaaaaaattgcagaagttttcttaccacacattgctgagctttatgctgaaaaacaagttgagctacgtggttgcccagaaacacgtcgtattttgggtactactgtcaaacctgcgacagaagaagattggtataccgaatatctagggccgattcttgcagttaaagtggtgagtggtattgatgaagcaattgaccatatcaacaaatatggttcgcatcataccgatgcaattgtgacagagaactatactttggcacgtcagttcttggctcgcgtagattcaagctccgtcgtagttaatgcatcaactcgttttgccgatggctttgaatatggtttaggtgctgaaattggtatctcaacagataagattcatgcacgcggccctgttggcttagaaggtttaacttctcaaaaatggattgtgttaggtgacggtcaaattcgtcaataagtctcctacttaaataaaaacgcctgatccatatcaggcgtttttattttgttatttcccacagaaaaaccagcccgaaggctggttttttttaaccatagatcaattagaaaataaagtcggtattcacaaatttcgaatagtgctcagacaccatagaagccagcatacctttactgtcatcagtctgtttagccgcaatcatagagcgaatcgagaatgcacgaagtgcatcatgcacagaaagtgtaccttctgctgaatctttacgaccaccaaatgggaatacatcaggaccacgttgacactgacagttgatgtttacacgacaaacttgatgtacaagtgtatcgaccaaatggccaatttgcgctgggtcactaccaaaaatactcacctgctgaccatgatcagaagtagtgacataatccaatacagtttcaatatcatcataaacagcaactggtactactgggccaaactgttcttcgcgatacagtctcatcccctcagtcactggataaactacggctggatagaacatggttttgcagaattcacccccttccggattaaccacttttgctccttttgccacagcatcttcaatcacttcagtcatgtaggctgtacggtgcatgcccggtagcggcgtaatagatacacctttttcccacggcatacctactttcaacttagccagctcagtcgttaaacggttaacaaactcatcggctatcgaacggtgcaccatcagcatttttaaagctgtacaacgctgaccattgaatgacaatgcacccaacaggcactctttcactgtcaggtccaaatcagcatctggcaaaatgatagctgcattcttcgcatccaaccccaaaatcgcacgcagacggtgagatttaggatgttgctttttcaagtggtcggccactttactagaaccaatcagtgccagtacattaatttgcccagatgccagcaaatgcggcaccactagagaacctggtgcataaatggtattgatcaccccttttggaaatgaatcacgaaatgcctctagcaatggttcaaataataaggttccaaattgaggtggtttaaaaataatagtattacccatcagcatagccgggatcagggttgcgaaggtttcattcagcgggtagttgtatggtcccatacacaacacaacacctaatggagtacgacgaatttgaccaatggtgccttcagcaattacaaagcgggagttggcattatccagatctttcagggcatcaatggtttgacgcatgtaggtaatagtacgatcaaactctttctctgaatcggccaagctcttaccaatttcccacatgatcagcttaataatcagatctcgttgctctaccatgcgctgaataaaattttgcatacaagcaatgcgctcactaaccttcatcattggccattcgccacgaccattgttgtaagctcgtaccgctgcttctaatgcttcatcactttctttttcgcccatgactggataactaccaagttcaacttgctctaggctaccgtcaggctgctgaatccagattggagataatgttttcttggttgcaccagcccataacttcaactcaccatccacgagtgaaacacgctgatgaatttgagatggcaaacgtacactttcaggaataccgtccactactgggaatttatgctgtaaattatttaactgattcattcttcttaataccttattatttgtatgtctttatatatccccgaaccgtacactgtaatcagttcttcttcggatcaataccactattattatcagtactcaccttgcttgaaccgtagaccacaaggtgaattcttaaagcatggatagtttcgatattttctagatgaatttacccccgacacacactatcagttacccctagcttttggataacttgttcaatgatctgttctggtgtgagagcaatatcaatagcaattgcttcattcacatcaggttcctctaatgtatctagttgggtttgtaacaatgccggatcaaaaaaatgaccagatctttctgcaagtctttgctgtaatagttcataagaaccttttagatatacaaacttaacattctggtcctgccctcttaaaatatcgcgatacatccgctttaaagatgagcatgtaaacacagccgtttcaccatctctttgttttgcttcaattgcctgacgaatagcttgcaaccacggcaagcggtcttcatcggttaaagggataccttggctcatcttacttttatttgcagctgaatgaagcgtatcgccatcaagaaactcacaagccaaacgctctgataacaactcaccaataagggttttccctgtgccacaaacacccattgctatcactatcatggattacctacctctaattacaaaacagcactaagcaacaatgtgaaagacaaaccaagtaccgaaataattgtttccagtacagaccaagtcttcagtgtctgcccaactgtcattccaaaatattctttgattagccagaaaccagcatcgtttacatgcgagaaaattaatgatccagaacctgtcgctaatactaaaagttcaggtctaacgactacacctgctgctgccgcaataggtgcgacaatgctacaagccgtggccatcgcaacagtagccgaacctgttgccagacgtatgagagcagcaacaagccatcctaataacaatggtgaaaggtttgcttttaaagcagtagagacgatttcattagaaattccactgtctcttaaaataccgccgaaaccgccaccagcaccaacaatcagcaaaatacccgcaattgaagctagacatccaccacagaatttttcaatttgttcacggttaaaaccctgcatagtgccaaaagtaataaagctgaccaaaacagcaataagcaatgcaatatcagaagtaccaataaagcgtaataactcatttgggaatgtttttggtgcaaagaaaacatctgcccaactaccaactagcatcaatgcaaccggtagcatgatcgtaaataaggtaatcccaaagctcggcaattcacgtgtgttgttagcatctgcttcaacaaactgctttgctaaaggattattttctggcaatttgacatatttgttaatccataatgcatacaatggacctgcaacaactgctgtcgggacgccaaccaataaactgtacataatggttttaccgatgtcggcatggtaagcctgtaccgcaagcaaagcggctggatggggtggaatcaacccatgtacgaccgataaacccgcaaccataggtaaaccaacaattaataatgatttacctgtacgtttggcaatattgaatgcaattggaataagaagtacaaaaccaacttcaaaaaataccggaagccctacaattaacgcaatgaacatcatggcccagtgaatatgtttttcaccaaaccatttaattaaagtaattgctattcgttctgcaccgcctgactcggccatcatcttgccaagcatggttcctaacgcaatcacaatcgcaaggtgacctagtgttttaccggtacctgcttcatatgatttaacaatcccgtccattggcatgccaactgcaagagctaaaccaagagaaacaataataagaactaaaaaggggtaaattctaaacttcgcgatcatgacaatcaaagcaacgatcgcaattaaagtatagacaagcaacatgccaccctgaaccgtctccatgtgacactttctccttggaataatgttatctaggcactgcctaaataaaggtcttcaaccagagatatactcattgttgaagcactcattttttatatttagtatgactagcaaccgccagtcacagcatcacaaaaaatctaaagcacctaaaagacactttagatttttaaaccacaattactttcgtaaaactcataactgacttgcaatttgggctaaacgggtaatttcagcccaatcttgtgcagcgacaacaggtttaggcgttaaccatgacccacctacacacaccacattaggttgctttaagaaatctggagctgtctctgctgtaattccacctgttggacagaaacgtaagtttggaaatggaccataaaatgcttttagcatctcaaccccacctgcctgttgagcagggaaaaacttcacaatgtcgtagcccaactcaatcgcttgaatgagatcactcggtgtcattacgcctggtaaaagaggtaaacctgcatcttgtgcagccaaatgcaagtctttggtcaaaccaggtgataccccaaatttagcaccagcttttttagcttgtgcacaatgctcaggcttagtaatcgttcctacacctaccacaatgtcatctgctaactgagatgcacgttcaatggcagcaagcccagctgctgtacgtaaagtaatttccagtacctttacaccaccagcatgcaacgcacgtgatacatgttcaccttgttcggcagagtcaaaagccaacactggaattactggacctaatttgacaacatcttcaatcttgctcattactttgtaattcctttgtcttaaatctgcccttgtggctcttcgccaacaagtgcaccaaacacagatgcgccatgttcagcaggcgctgctgccgcacggaacacaccaaataattcacggccaaaaccaacttcgttttctgcctgatgttctggttgagcaacaggacgtgactgccaagtctgctcatctaactcaatatcgagtacaccagcttcagcatcaatgattaacatatctccggtttgaactttgccaatcggaccattcaataacgcttctggagacaaatgaatgactgctggcactttgcctgaagcaccagacatacgaccatcggttactaatgcaacatggaagccttgatcttgtaaaacgcccaacacaggagtcaagcggtgcaactcaggcataccattagcacgcgcaccttggaaacggacaaccgcaataaagtctcggtgcaattcaccacgatcaaacgctgcctgtaccgcttcttgcgaatcaaaaacaattgccggtgctttcactttacggtgctctggtgcaaccgcagaaatcttgataacaccacgaccaaggcgaccttgcattaagcgcaagccgccatctggctgaaacggcgcatcaatgctacggagtactttgtcatcaaggctttgaactaccccgtcaacccaagtgagcttaccgtcaatcaatttcggttctttggtgtaatgcagtaaacctttaccagcgacagtcgtcacatcgttatgtaacaaaccagcctcaagtaagttacgaataaggaatgctaccccacccgcagcttggaaatggtttacatcggccttaccatttggatagatttttgcgagcaatggaacaacagcagacaactcatcaaagtcatcccagtcaattaagatgccagccgcacgcgcaatcgcaataagatgcaacgtatggttggttgaaccgcctgtagccaataaagccacaatgccattgataatggctttttcatcaataacatggccaatcggcgtgtagttgcctcgctcggcagttaagtcaagtacacgtttagcagcttcggcagtgagagcatcacgtaatggggtatgaggatgaacaaatgccgcacttggcaaatgtaagcccatcacttccatcaacatttggttactgttcgcagtaccatagaatgtacatgtgccctgaccatgataggcagccgattcagcttcaagtaaggcatcgcgtcctacttgacctgtcgcgaattgctggcggattttagctttatcatcattcgacaaaccgctactcattggccccgcagggacaaaaatggttggtagataaccaaactgcaaagcaccaatcagcaagcccggaacaatcttatcgcataccccgagacacaatgcggcatcaaacatgttatgggaaagtgcaatcgcagtccccatcgcaatggtttcacgtgaaaatagtgataattccataccggcattaccttgagtaataccatcacacattgccggtacaccgcccgcaaactgtgcaacaccaccattttcacgtgcagctgtttttataatgtcagggaatgttttatatggggcatgtgctgaaagcatttcattatatgaagacacaatgccaatatttggttcacggccaactttaataattaatttttcattatcttccatgccagcaaaaccatgagccaggttggcacatgagagtgcaccacgagctgggaatttgccttgggcatgttcaatacgttgtaaatatgcagaacgagttttttggctacgcgcaattacacgttcagtaacttttgccaatactggattcggcaagtccatgctggacgctcctgtacaaccggataagccggaacataaaaatagaccaaatgatatatttcatcatcatttgataagggggaggaacaatattattaaggcaaaaagcgacatgcaagccctagtcaactttacggtaatactcgagcatcggtattaaatacaaattatgtttaagttttaaacgagaagctggttttatttttgactatatttattggtatatctgcctctattaactatgagaaaattctcataatatcaaagcaataaaatattcttataaatgtattaataccgacttttttatactaagttttatattaaaaatgtttatgatttattcattttaacctatatataaacgattaaaatttaatttcatttacgtatattatttgtaatactcccctctagtttgattaaaataacagcacttcttttttcttaaaaaatttataccaaatatttgaaaaatacattaaatagaaattcacctttcataaatatatacaaaaaactgtttaattcttctacaaaaaaacaataaatacagtggttaagctttatactgagcgaatattagttataaaaaatttaatggtcgatagtgcttaagtctaatgggctaaagtctatcttggacagaaaaacaacacatgttaaaacatcacaacctgctcttaatgcatcacacaattaatgccttttgatcaggaagttaggaaaactatttttatatcaggacttgggtatttcaacgtggctacatcagtattagttattaattgcggttcttcatctattaaatacgcactggtttcagagcgtcgtgaagatcgtatttacggtttagcagaaaacttaggggcagctgatgctcgtattaaagggattaccgtcggtggagaaccgctagagctttcaattccttatgctgaccacgccaaagctttagaaactttacttgcacgtcttgcaaactataaacctcaagcaatcggtcatcgtgtcgtacatggtggaagccttaccaaagctgaactactcacccctgaaattgtagaacgtattcgtgcagccactccgcttgcaccgcttcataatcctgctcacttaatcgggattgaagcaacgatgcgcctattccctgaattacctcaagttgccgtatttgacaccgcatttcatcaaactatgcctgcacatgcataccgttatgcaatccctaagtttttatatacagaacataatgttcgtcgctatggtttccacggtacaagccatgcttatgtgtctgaccgcggcagtgaactggcaggaaaattccaaaaaggcggttggttaacagcacacttgggcaatggtagctcgacttgtgcagtgtggaatggacaaagtgttgatacttctatgggccttactccacttgaaggtgttgtaatgggaacacgtagtggtgatgtcgatccaagcttacacagcttccttgctaaaaatcttggctgggacttagcaaaaatcgataaagttttaaataacgaaagtggattacttggcttatcacaactctctaacgatatgcgtacagtgattgaagctgctgaaaatggcaatgaagatgcttgccttgcgattgaagtatttagctatcgccttgcaaaatcacttgctgccctaagttgtggtttaccaagtattgatggcttgatctttacaggcggtattggtgagaactcagcttatatacgtgaaaaaactctagcttatttacctcatttcggtttacagctcgataaagaccagaacaacaatttaaaacgtggtacagaaggccgtattgatagcggcacaggtccacaaatctgggtgattccaaccgatgaagaaggccgtattgccaaagaaactcgtcaggttgtagaagtttcacaaaatacatctcctgaagttagccttgcttaattacagaagtcaaaaaacgctattcatttatttataggtttatatgaatacaattttattaattcctacaggtgaaggggttggtttaacctctgcctgcttaggtatgatttatgcacttgattgtaatgggattaaagcaggctttttaaaaccgttctctcaggtagatcaagaaaatttagaccgaactacatctttatttggtcatttatttcaaagcaaaactgtccaatccatttctcatgaaaaactaacccaacgcattgcggctggtgaagtcgatgagttacttgaagaagcagtaagtcttcatcgcagtatcgcagcagataataatgtgattattgttgaaggcttattaccaaatgggcaagaccattttgccagtgaacttaatgcaagccttgcacaagcgcttgatgctgaagtggttttagtcagtacagcagatattcaaaacccacgtaaaacagcagagaaagttgaagctcacttacggcagtttggtggtgcaacctctaaccgaacagcgggcgtactctttatgcgtacacgcgggttatctgaagagacagctcaaatacctgtcgcatttgacccgtcgttacgtccaaccgaagacatcgcaaaatttacggcagaattgcaaaaatataaccgctactttggatcaagcgatttaccaattattggtctagttccgtttagtaataccttaagtgtacctagaacattggatatcgcgagcgtgattgatggccaatggataaatcaaggcgaagcaaaaacacgtcgtattttgcactcaagtttaattgcctcaagcattgaatatgaactgaataaattcattgctggcgaactgattattagcgcttctgaacgtaccgatgtattactggcaagtagtctcgccaccagtaatggcattccactggcaggcttggtgttgactgagcgtgaagctcctgctcccaagcttttagagttttgccaaagtgcaattaaacaagggttgccaattttacatacccatttaaatacactagaaactgcgcagcgcctatccgattttggtaatgaaattccaaccgatgacactgaacgtgccgaacaagtgacccgatttgtttcaagtcacatagatgtcgaatggcttaaacagcatagtaataacggtgctataccacgtctttccccttctgcattccgtcatgaactggtgcaaaaatcaattgcagctaaaaaacggattgtccttccagaaggtgatgagccacgcactattgaagctgctactatatgtcaggctcgtggtattgcgcattgtattttgttagcaaaaccagaagctgtacatgacgtagcaaaagcacgtggtatcgagttaccggctgggttagaaattattgatccagatcagatccgtgaccaatatattgcaccaatggttgaactccgcaaaggcaaactcaacgacctacaagctaaagagcaattacaagatactgtagttctcggcaccatgatgctagctctagatcatgtggatggattagtttcgggggcagttcatacaaccgccaatacagtgcgtccagctttccaattgattaaaaccgctccagcatactcactggtttcatccattttctttatgcttttaccggatgaagtctatgtctacggtgactgtgcaattaacccggatcctacagccgaacagcttgccgaaattgcgattcagtctgctgactctgcaaaagcgtttggaattgacccacgtattgccatgatcagctactcaactggtacatctggaacgggtgctgatgttgagaaagtacagcaagcgactcaaattgcacagcaacgtcgccctgatttactgattgacggtccactacaatacgatgcggcttcagttgaaagtgtaggacgccaaaaggcgccagactcacgcgttgctggccgtgccaatgtgtttattttccctgacttaaatacaggcaacacaacctataaagcagtacaacgtgcagcaaatgtagttagcgttgggccaatgctgcaaggcctaaataagccagtcaatgacttgtctcgtggtgctttagtagatgacatcgtctttactattgcattaacagccattcaggccgagcagcaagctgctgccaaataattaatatcatttaatcttttctacctctcgccatttgatatccgctcaaatggcttttttattttttaaagaataagcctgattctaggttgttcttaattttaaataacttagcctttgtgttattcgactttcggtcaaaagatcaaccaatcccccacaagattgtctttttgtcatataatttagcccgctagctaacagcccgctcaagagattttttggtatgacaacgattatcaaacaagatgacttgattacatcaatcaaggacgccctacagtttatttcgtactatcacccgcaagactttatccaagcgatgagccgtgcttatgatcgcgaagaaaacaaagctgcaaaggatgcaattgcacagattttaattaactctcgcatgtgtgcggaaggtcatcgtccaatttgccaagatactggtattgttaacgttttccttgaagtgggcttagatgttaaatttgatttaacaatgagcttagacgatgcagtaaatgaaggtgttcgccaaggttaccttgaaaacagcaacgttcttcgtgcatctgttcttgctgaccctgcatttggtcgtaaaaatacaaaagataacacccctgccgttattcactacaaactcgtaccaggtaacaaagtagatattacagttgctgctaaaggtggcggttcagaaaacaaatctaaacttgcgatgcttaacccatctgactcgattgttgactgggttcttaaaaccgttccaactatgggtgcaggctggtgtcctcctggtatgctcggtatcggtattggtggtactgctgaaaaagccatgatgcttgcgaaagaagcactcatggaagaaatcaacatggacgaattacttcgccgtggaccagagaacaaaatcgaagaacttcgtatcgaaatctttgaaaaagtaaacgctcttggtattggtgcacaaggtcttggcggtttaaccactgttcttgacattaaaatcaaagactacccatgtcacgctgctggcaaaccagtaggtatgattcctaactgcgctgcgactcgtcacgctcacttccagcttgatggttcaggtgtagctcatattcaagcaccaaaacttgaagactacccatctgtaacttgggatgcttcacaatctaaacgtgtaaaccttgataccattactcaagaagaaatggattcttggaaaccgggcgacacattacttcttagcggcacaatgtacacaggtcgtgatgctgcgcataaacgtatggttgaaatgatcgacaacggtgaagaattaccggttgatcttaaaggtaaatttatttactacgttggtcctgttgatccggtacgtgatgaagtggttggtcctgccggtcctacaactgcaacacgtatggataaattcacacgtaaagtactcgagcatactggcctattcggtatgatcggtaaagctgatcgtggtcctacagcaattgaagcaatcaaggacaacaaagcaacttaccttatggcggtgggcggtgcagcttacctcgtatctaaagctgttcgcgaagctgaagtggttgcatttgcagacttgggtatggaagcaatctacaaatttgtagtggaagatatgcctgtatctgttgcagttgatgtaaacggtacatcaattcacgcagtagctccaaaaatctggcaagcgaaaattggtaaaattccagtaatcgatgccgcagctggctaatcaagaaaagcaccggattcggtgctttttttatgccttttaatatttttttgaaattgaaaagaattgtaacaattggttcgccaatctgtgctattaatgaatacacccacccgccctacactgcatataggtcatttcatgactattcgccctattcttaaaaatctttcaatcagtctctgtctaagctgtattactacaagcttatttgcttctcctgccaagttaagttcagtgaaagaactcatgcaaatgagccaaattgattatctattgaaagaatcaatcaatgagttaacgccttactatgatcaacaggctgaacagatcattagcaatattacgggcatcaaaactttaggcccgaaagaaaaagaggcagcgaaaaagttaggcttacttttaaaagattcgagtaaccagctgattagtagccctaaaacgactcaagccttacaagatatttatttaaaaacttataccgaagaagaaatccaagcaaatttaaagtttttgaaaaccccagaaggccaatcaattacccgtaaaaacgtacagattatggggcaaatttcagaatatatgatggaattgggacagcaaacttttaatgaccctaaagcacgagatcatatgcaagaagaaatgctaaaaattattgcacccttaatgaaagataaagaaaagtcttaacttttctttatcgacctcaaattgttaccacgttaaggggttccacaatttaaatggttttatcagatgtacatctgacttttcattatatttagcaggttttaattcttggggcttatgacgtatttttcctgaagcatcttcagcaacaaaattatagctagaagatttaagctcggtaaatgcaatttctctacgaccaatattatcttgcattaacataaatggacccgtgtgctcactacggtccattttattttcttcatcatacttcaaataataagatgcgcctgcatctaccgtaatatcgatatatttaggttcttgaaaatggatccccaacaaagggcggctcgctgaaatacggtaggttcctgctggcagttcaatccagtaataatggttatgcaataaacttggaattcgtttgccatttacaaataaattgatggctgcaatttcttgacgattccatttcgtgtctggacggtaaagatagacaactgctgcctgctcattttggggtttaactggcgcaaatgtctgacctaacttttgatttacccatccccctacagtgaagccccctaaacgatattgatccaataaaccgggttctttatcaacatcaactttaggtaaagtggcagtcagttcacctgaattcttttctaagtgtgatgaactttggcaacctgcaagtaatgtggcacaacttaaagcaataattaaataacgcatgacatccctcaaagcgttttcttttgatttttctatatcgcaaaactatgcgtattttgtttttttagattaacaccacctacatgaattgaaaacaaaaaaagcatgaatcaccgaggcaattcatgctttttagatgaatgaaatctaagcagacttcgaatcaattacttttaaatctgccttagcaacactttcatgtgttactgcttctttaggctgacgttctgacttgtagacaggttcagcttcaccattaataactgcttcattaatgaaaactgttcctacatctgtacggcttggcaagtcatacatcgtttcaagtagaacattttccaaaatcgagcgtaggccacgagctccggtattacgctcaagcgcacgcttagccactgcacgtaaagctgaatcttcaaatacgaggtcaacattttccatattgaacaggtattgatactgacgagttaatgcatttttcggttcagtcaaaatttgcattaacgcttcttcatcaagctcttcaagcgttgcaatcactggtaaacggccaatgaattctggaattaaaccaaatttaactaaatcagttggctcaacttgacggaataattcagcaagttttttggtttcatctttgtttttaacatcagccgtaaagccaattccgcctttctcttgacgctgttgtacaattttttccagtccagcaaatgcaccaccacaaataaataggatatttgaggtatcaatttgaatgaactcttgctgtggatgcttacgtccaccttgtggtggaattgaggctacagtaccttcaatcatcttaagcaaagcttgttgtacaccttcaccagacacgtcacgagtaatcgacggattttcagatttacgtgtaattttgtcgatttcatcaatgtagataatacccttttgagctttttctacatcgtaatctgctttttgcaaaagtttttgtacgatattttcaacgtcttcgccaacataacccgcttccgtcaaagtagtcgcatctgccattgcaaacggcacatctaataaacgagccaatgtttgagcaagtaatgttttacctgaaccggtaggcccaatcagtagaatgttacttttagcaatttccacatctttagacacatgaccagattgcccgacttttaaacgcttataatggttataaacggcaacagataatgtctttttggcaagatcctgaccaatcacatattgatcaagcgcagcacgtatttcatgtggttttggcaatgccttgcttgcccagtcacctgcttcaacctgttggctggtttgtacaaggtctaagcagacatctacacactcattacaaatatatgcgtcctcgcccgcaatcagtttcccgacttcagactgcgttttaccgcaaaatgaacaatgtttttgtccttgaggatgttcggacatattctctccacaaatagaatcttaaatatgagggcaagcgatagggttaaatgactatatggaggcgttttccaacaactcaagccacttaatattttcccttatggacgcttacttaatacctgatcgaccaagccatattcttttgctgcttgtgcagtcataaagttatcacgatcggtatcacgagcaatcgtgtcatagtcttgaccactgtgttctgccatcaaacggttcaagcgctctttaataaatagaatttcacgagcatgaatttcaatatctgatgcttgaccacggaatccacctaatggttggtgaatcattacacgtgcattttcaaggcaatagcgtttacctttagcaccagcatttaataagaatgcgcccatagatgcagcctgccccatacagtatgtcactacatcaggtttaataaattgcatcgtgtcataaatcgccataccagcagtgaccgaaccgcctggcgagttaatataaagatggatatctttatctgggttttcagcttccaagaacaacatttgggcaacaatcaaatttgccatgttgtcttcaacttcaccagttagaaaaatgacgcgctcacgtaaaagtcgtgaataaatatcaaaagaacgttcgccgcgagaagattgttcaaccacaacaggaactaaagcattttcaattgttggaacatacatacgttatttattcctaaattttttgtgacttaacctatggcaacaatatgcgggataatttctcaaattgcaaaaggttcgcactgaaatattatattatttatacctaagtacttaagacgtactcaaattaaccatatacctaaaaatgaaaaaggcgcctaaagcgccttttcctgacttctcaaaagattagcccatacggcgagcttgttgttctttcaataaatcttcataagatactgctttatcagtcactttagcagaagctaaaatgtgatcaacaacttgatcttctaacacaacagcttcaatttgagcgcgttgttgagcatcatttttgaagtattcaatcacttcagttggatcttcataagaagaagccatgtcgtcgatgtaagcatcaacacgtgcttggtcaacttcaagtttagcatcagctaatactttgcttaccaatacgccaagcttaacagagcgttctgcttgttctttgaacaattcgtcaggaagcatgctcttgtcaaaagattgcgcgcctgcaccaccaaattgttgagtgaactgttgaaccatttgttgacgttgacggtcaatttcttgagcaaccattgcagctggaacttcaatttcgttagcagcaacaagagcatcaaatgcagcttgtttaacttggttacgtaaaccattgcgaacttcacgttccatgtttttacgaacgtcagcttttaatttttcaatgccttcttcttcagaaacaccgaagatttttaagaattcagcatcaatctctggaagtttaggcttttcaacttgcttcacagtgattttgaactgagctgctttacccgctaagttttcagcttggtaatcttcagggaaagttacatcaataactttctcttcaccagctttcatgccaatgatgccgtcttcgaagccaggaatcatacggcctgaacctaacacaagtttaaagtcttcagcagaaccgccttcgaacttctcaccgtcgatagaaccttcgaagtcaaaagtcacttgcatgtcttttttcgccatacccttggttacagcccaagtttgacgttgcttttgcaagttttcgatcatggtgtcaacgtcagcgtctttaatttcagctgttttacgctcaacttccaaaccgtcaaatgcttttacttcaacttcaggataaacttctacagttgcttcaaaaactaaagcatcttctttatgttcaactttctcaatgttcggcatacctaccgcattgattttttcttgttgaattgcttcaaatacgctgtcacgaatgatgtcattcacaacttcttgataaatacttgcaccgtattcgcggcgaacaacgtttgcaggtactttgcccggacggaagccgttgatcttcacagttttggcagtgcgcttcaaacgagcttcaaattgctcgttaatacggctcgtcggtacagaaacatttaaacgacgggcaacgcccgaaaccgcttcagtcgttacttgcatggcttcctcgataaaaattagttagtaggaacagtttttaaaaaagtgctgtattatatgacaacttttaagatatacaaaattaaccgatcagatcataaaattgaaggacgtatttttaggaaatttcacagtaattttatgattttttaattttttttaatgcaacgttaagcaaaagtaattttttaactattctttacaaatctaaaattacaattaattttaataaagttatcgtttttgcaaacagttaagtttaatcaatcaattagagccattttgtaactaaaagtgattaaaactttcacatttccttcacaattctatcggcaaatccaattaacacaaactgtacatataaataagaattattattattcgcataacgtttatatttaagtcctgaaagtcatgtcattgattagaacacgtaaaaaaattgtttcctctgcaatcgcctcatcgctctcgatgatagcaacaactgcgatggcgcaagaagcagtttcgcaattaccaactatccatactaaagcgactcaagaagaatctttaaaggttgatcaatcagcaaactctaaatttgttgctccccttctagatactcctaaatcagtatcagttatctcaaaacaacttatagaagataccaaagtaacaactttagcagatgcattgcgtactgttcctggcattactttaggtgcaggtgaaggcggtaatccgaatggtgatcgacctttcatccgtggttatagttcagaaagctctatgtatattgatggtatccgcaactctacctcacaaaaccgtgaaatgtttgcggtcgagcaagtagaggtaaccaaaggttctgcatcagcaatgggtggtgcaggttcagttggtggcagcatcaatatgatttccaaggtagctaaaaagggtgattttctagaaggctcagtagccgctggtactgataactaccaacgtatcactttagatggtaataaagactttggaaatggcattgcagcacgtgtagctgttttgggacatcaaaatgaaaaggctgtccaaagtaatggggctgaatataaacgtgttggtattgcaccaagtattacttttggcttagatacaccgacacgtgcaactttgagctactattatttacaaactgatgataaacctgattcaggtattccttattgggattcatctcttggaaaagctcaaggtaaaccggctgaagtcaaacaaggtacatattacggctggaaagatcgagattttcaaaagcaagaaaatcacatcggtacaattaaattagaacacgaccttaccgacaatataactattactaatacggccatgtatgccaaatcaaaaaatgattatgtctggacaaacccagatgactcaaaaggtaatgttggcaaaggtcttgtttggcatcgtttgaactcagctattacagatagtgagacatttaccgatcaattagcacttacaggtaaatttgatactggcttcttaaagcacagatttaatgtaggagcagagtacagcaaacaaaaaactgataaaggcggctataacattattgatgccaaaggtaatgtttctagtactggcttctatagcgattgttcagacttatcaacaaattggtgtacttcgctcaatggtccaactcaaaagccatttgttgaccgtttacaagcacgcccagactttgatgcaactgtagaaagtacttctgtctacttactcgacaatattgagatcacaccaaaatggttattagatcttggcctacgttgggataagtttgaagctgaacaaaacttcttagccacttctagtgcagcggcctatacagcaaaaaatgattcagatttcgtgacctatcaagcgggcattacatttaaaccaacagagaatggctcaatttatacaagctatgcaacctcagctagtccagtcggcttaaatgcaggttggggggataatagcgaaacaattaatgccaataatcaaatgattgatcccgaagaggcacaaacatttgaaatcggtacgaaatgggatttcctagataaccacctaaatttaacagctgctattttccgtactgaaaaacaaaatacacgtgtacaaatcgacccaactacttatgcaaatgtaggtgaaagtaaagttgatggttttgaattaggcttaaatggtgaaattactgataaatggaacatttcagctggctatacttatttagacagtgaactaaccaaaaatggtaaatcttgccgtagcggaaaatgtactgaccaatccatttataatggcaaccaaatgccaaacgtacctaagcaagctgctacgttatggactacctatagagtacttccacaattgacggtaggcgctggcgctgtttactctgacaaagtatatggtgatgtagcaaatactaaatgggttccatcttacgtacgttacgatgcgatggcacgttacaacgtaaataaaaatgttgatcttcaattaaatatcaacaacctatctgataagcgctatttcactaaagcttacgcttctcactatgcaacagaagcagaaggccgtagtgcagttctagcagttaactttaaatactaagttaacctagaatcccataatatttttatggtttataatataaaatagcctctcttgttagaggctattttaattttctactattattactcgcaggtatcaccgtgatccatcatattcccaatgtcttgagtaaagagcaggtccaatattttcgtaatgaaatggataaaattgaatgggtcaatggcaaagtaaccgctggtacactctctgcaactgtaaaacgcaatcagcagctacctgaagatcaccctcttactcaccatctcagcaatattattcttgaggcactaggcacacaccctttatttttatctgctgcaattccacttgatatcatccctcctctttttaatcgttatgagaatcaggagtcttttggtttccatgtagataattctatccgacgcatacgtggtacaaatgaacggcttagaactgatttgtcatgcactttatttttaagcgaacctgaagaatatgaaggtggtgatctggtcgtagaagacacttatggttatcacgaagtgaaactcccagcaggagatatgattttatatccatccaccagcttacatgaagtgactgcaattacttctggctgccgtattgcttcttttttctgggtgcaaagtatggttcgtgatgacgccgagcgacatatgctttttaacttagatcaaacggtacaaaacctaagaatgcaactgggtgataatcatagtgaagtaattaaactgactaacctttaccataatctcatgcgtaaatgggctgaactgtaacactatttatttttgccttatttgagctaattaattatttttacctcaataaggcaaaataatgaaaattattttcaacaaaacataaaacaatggaaaattagaaaattattttctaaacactgaaattaaaatctctataagacttttgcacaacgtgtaatcatcgtttagatgtggtatatctaaacaataagcatatttgcaaaccaccaaacttactatttcatggtctatagatgaaaacgaattacttgtttgcccagcctactcaagcaagacatcatctcgaactcctgatgctgcgcctcgcgcgcgtataaatttttgtctgtattttagagcagaccttttcaaattccctttaatttttctgtattagataccatatataactgtagacgttgcctttcacacgatacttgacgcaaccgtgctacgagataaggagttttctcatgatgttggctgaccctagcaaaaaataccgccgtatgtaccagcgagtcgatttaccagaccgccaatggccaaataatgaaattacaaaagcgccaatctggatgagcacggatttacgtgatggtaaccaagcaatttttgaaccgatgaacatggaacaaaagttcaaaatgttcaaaatgcttgtaaaaatcggttttaaacatattgaaatcggcttcccttctgcgtctcaaattgacttcgattttactcgtatgttgatcgaagaaaatcatattcctgatgatgtatacattgaagtattggttcaggcacgtgaccatttaattgagcgtactttcgaagctttagcaggtgctaagcgcgcaattgtgcatatttataactctaactctccaactttccgtcaaaaagtgttgaatgtagatgttaatggcgcaaaacagttggcggtgaatgcagctcagaaagtgaaagaatatgctgcgcaatatcctgaaactgactggattttccagtatagcccagaatgcttctctgcaactgaattagaagtagcgaaagaagtctgtgatgcggttacagaaatttgggatgcacgcccagatcataaagttattttgaacttacctgcgactgtcgaagtttcaacaccaaatgtttatgcagatcaaatcgaatggatgcatcgtaatttggcacgtcgtgatggcgtgattatttctgttcactgtcacaatgaccgtggctgtggtattgctgcatcagaacttgccattatggcaggtgccgaccgtgtggaaggctgcgtatttggtaacggcgaacgtaccggtaacgttgacgttgcagcaattgcattgaacatgtacacccaaggtgtagcgccagaattagatttctctaatattaatgaagtcattgcaacggttgaagaatgtactggtttacctgtacaccctcgtcatccatatgcaggtgacttggtatttactgcattctctggttcgcatcaggatgcaatcaaaaaaggctttgaataccagaaaaacgaagaaatctgggatatgccttacttaccaatcgacccgaaagatttgggccgcgactatgatgctgtcattcgtgtaaatagtcagtctggtaaaggcggtatcgcttacttattagaatcaaactataacgttgtattgcctcgtcgtttacaaatcgaatttagtcaggttgttcaacaatatactgatgagaatggtacagagattagtgctaaacaaatctggaccttatttaaagacacgtatgttgaagtgaaaaaccaccattacacggtcaaaaactataagttatctgacattaatggtactcaaattattgaacttgagattgatgttgaaggtgaaactcaacaattacgtggtgaaggtaatggtcctatctctgcattcttaaatgcacttcaattaccaattgatgtattgaactacgaagaacgcagtattagttcaggtgcaaatgccaaagcattaaccttaattgaacttcaagtgaaaggtacaggcagaggctcatttggtgcaggtgttcacgacaacacagtcacttcatctattgaagctattattgcatgtaccaaccgtttgattgatcaaggtgttttaagtacagatcaggttgttgccgccgctgtttaattaaaaaaagactttggaaaggatacctagcttggtatcctttctttttattcctgaaagatttaaaaggcgaaatgttcccgtgtcttttccagctgactcagtggggttagtcactccgcaaaagttccaatttgaagaacccttacatcttgaatgtggccgtgttttaccgcgctttgagttaatggttgaaacttacggcactttaaatgcagataaatcaaatgcgattttaatctgccatgccctttccggacatcatcatgcagcgggttatcaccatgaagatgataaaaaagctggatggtgggatagctgtattggcccgggcaaggcaatcgacacaaataaattttttgtagttgcgcttaataatattggcggatgtagtggatcaaccggtccaacttcaccgaatcctgaaaatgacaatcgtccctatggtccagatttcccgttagtaacggtccgtgactgggtcaaaactcaagccatgctttctgaccgcttaggaataagtgtctggtatgcggtggtcggtggttctttgggtggcatgcaagcattacaatggtcggtagactaccctgaccgtttacaaaaatgtgtcgttattgccagtgcgccaaagctttcagcacaaaatattgcgtttaacgaagtggcacgtcagtccatcttgtccgacccggacttccatcatggccgttatttggaaaatgatagctatccgaagcgtggtctaattttggctcgtatggttggccatattacttatctttctgaagaagccatgaaacaaaaatttggtcgtgatttaaaatccggcaagtttatgtacggttttgatgtcgagtttcaggtcgaaagttatctccgttatcaaggtgaacagttcagtcgtaactttgatgccaatacttatctcattatgaccaaagctttggattattttgatccatcgcgtgagtacggtcactcgcttacagaagcgatgagtaaaaccaaatgccagtttctgattgtctcattcaccactgactggcgttttgcaccaagtcgctcacaagaaattgtagatgctctcattaccaatcataaaccggtaagttatcttgatattgatgctgaacaaggtcatgactcgttcttattcccgattccactgtatgtcaaaacactgcgcgctttcttaggcggtgaagaacatttaaaatcgacttcactggaggcaagctaatgcgtattgatcaacaactggcagaaaagtggattaaacccggctctagcgtactcgatttagggtgtggtgacggtgaattactcgctcatatgagccaaaagcatcaaattcgtgcttatggtttagaaattgatcaagaaaagattgcaattgccgtcagtcgcgggttaaatattattcaacaagatttgaatctcggtttaagccgttttgccgaccagtcttttgactatgtggttatggcacaggctttgcaagccgtagatgcacccgatgttttattaagagacatggtgcgtgtgggtaaacaggccattatcacttttccaaactttgcacactggaagactcgctcttttctagcattaaaagggatgatgcctgtatcggatgctctaccatatatgtggtataacacccccaacattcatttatgtacgtttaaagatttcgaagcactatgtgcggaaaatcaaatacaaattattaatcgactcgccgtcaatggaaaccagcagggaagcctgttaagcaaacatgttccgaatttgtttggtgaagtcgctatttatcgagtgagtgcactatgaaaaagacattatttagcacactaattgcaggactgctaagtatgcaggctcatgcagattatatcgcccagccacaatcggttgcgagccaagctgcgcgcttctccacaatggggattcatgaccttcaaaaagctgctcaagcgggtcaagctggagcacagttttatcttggtacacgttatcaatacggcaaagatgtagcaaaagacgataaacaagcatttgcatggtttaaaactgctgctgatcaaggtctttcacctgcgcaattaaatgttggccgtatgtatgctgatggtattggcgttaagaaagacgaagctatggctcgtaaatatttcgaaaaagcggcaagtaacggcgataaccgtgcaagctacaaccttgcgatgatggaagagcaaaagaaaaactacgtaggtgcttaccagtggtatgaactttcaactcgtgatggcatgctcgacaataaagtgattagcttatctgaaggtaaaaagacggctcttgctgcaaacttaactcaagagcaaatccgtatggcacgtgaccgcgcggataaatggattcaagcacaataataatccagcttatacttactcgactaaaaccaccttatatcacctataaggtggttttagttttttaagcttctaattttatattccatttgttttgctctatatcccctttcaaaaaacacgtaacatagctcacgttcaatattggttataaagtttggttatcttatgtctaccccacattggtttgatcagggctctttagtccttgcaagtaacaacaaaggtaaagtcgcagagtttgaaaaactttttgaacagctcaagttgcctgtagaaattattcctcagggtcacctaaatattcccgacgccattgaagacggcttaagctttattgaaaatgccattattaaagcgcgtcatgcctctaaaatttcagggaaacctgctatggctgatgactccggtatttgtgttccggttttagggggtgcacctggtatttattcagcacgttatgctggagaacatggtgacgatgcagcgaataatgccaaattattaaatgaccttttgccatttcgtaaaaatggtgaagcgattgaaggtatgtttgtgtgcgtacttgctttagtgacgcatgcggaagatccattgccacaaattttccaaggcatctggcatggtgaaattttagaagcgccacgtggtgaaaatggttttggttatgacccactgttctggttaccagagcttcaagtttctagtgctgagttgtctaaagaagaaaaaaataagattagtcatcgtggacaagcgatgcagttatttagagagagcctgcagaagtaggctgatcacagggccaaactatacagcgttaaaacagattaaactttgtataggcgaaccttacttttcaaagatgaaaagtaagcaaaaatcttttgttagactgatggcacttccctgtgccacagtctaactggcggcatccatgccgccttcgcacaagtaaatgtggggaagaaaatttaaaattaattataatgctacatgtaaaaacatcgcataaatcgcaatacacacacaactcacaatcgtccctgaagcgatataagcagcagatctacccgtgccttgataatgggtttctagagctacaatattggctgccggtggcaagcaaaacattaaaaacattacaccgatgtgctgatttatatttggaatctgtaaaaatctataacttaatccacaaagtacaaatccacaggccactttaaatgcttgagcttttgtactgtaaattaaatcttttgcataaactctggtacggcgcagccacattccaagcacacacatacctgcaaaagtcattgcaaatttagcaacctcataaacccaatgtatagcagggctttcgatatgttgggtccctaaaagtctgagtacaacagcacagaatatcgatatacaaggcggagaagttaaaaccttttttaatatattgagcttactttgcggtgccgtagtaacggcagtcacagcccaagcattgccaaaaagcgacattccaatatataaagcaacaattggagcagttgcttcaggaccgaataaagccatagcaaaaggaaaaccaagccatcccatgttggtataacttacgcaaagtgccaataagcggtctttaaataaagccagataagcaaagaaaataatgaacgccgaaccaaaactaaagagcattaagctcaagcttcccgattgataaaagaccatgttgtaaataatcacaatcggaatcaggagtcgtgcaagccaagctgagagaataggttttacggtttctgaaatggaggtctgagcaagtagaagtcctgtgataaatgccaatacaggcagtaataatgccacgctctctcctctcgctcgtcaaaatcagcttgttatgctacaccttttgattttgaaatgtatgatctatttcaagtaaattcgtctaagaacgaagctcgataaaatttaaaaatcctcccaaaaaatatttttaaaaatctgatcgtaagtgtctacttataaatattgtcttaaaaatgaaatataaatgtcacattcctgtcatggcaacctgttgatataaagcgaactaaaaagaggtataaaatcatggctggtttatctatttggcatgtcgttattttcgcaattgtcgttattttattgttcggtacatctaagctaaaaaatatcggtaaagatgtaggcggtgcagtaagagattttaaaaagtcagttcgtgaagaagacgaagctgcatctttaaatagccctcgtacaattgatgcacaagttaaaacatctgaaagcacatcagtgaaaagctaaaggtttgacccatgcttgatgtaggaatgacagagttactctgttttgcaattattgcaattttagttttaggtccagagaagcttccggaagctgcacgctttgcaggtcgctggtatgttcgactaaaacgctatattacgaatctgcaaaacgagattgatcaggagctacgtctgtctgagttccgcaaagaaatgcaagaggaacttaaccgcattgaagcattggaacgtaaagtacaacaacagcttgaagaaatacaaaaacagcaggtttcagaatctttagaagcaactgaaacagctaaaacaacacaaaagcctattcggaaatgtactcctatatcgggccattacaaagtgccgtatctgactaaagttacgcctttggctcctcaaactgatatttcagaaacatctcctgttgaattgaagattgccgtatgaaccaactgccttcaaccgctgtaaatagtcaagaaaacctagaccaaatgccaatcatgaatcatttggtggttttaagacgtcatttatttaggattgtaggggtaacattattcttatttttttgtttactaccctttcgaaatcatacttatcaattattatctgagcctctaaggttacaacttcctgcctcatcttccatgattgcaacggatgttacagcaacatttatggcgccatttaaacttaatttatttgttgcgctcatgctggcaatgccatttattctttatgaaatatggtcttttgttcgtccagcgctttatcaaaaagagcgtcatttagcgctgccgttactgattggtagtattattttattttatgcaggtgtcgcttttgcttattacattaccctgcctgccatattacatttctttattagcgtttcacctgaaacagtagcaccaatgaccgacattaatagttatttaagcttctgcttaaagctatttttagtgtttggtgtcacttttgaaattcctatcgcgaccttgctactcattttgattggtgtggtaaatacgcaaagccttgctgaaaaaagacgttttattattgtaggatgcttctttgtagcgatgtttattaccccacccgatgcgatttcgatggtgatgctagcaattccaatgtggctacttttcgaaataggcttactcttcggcaaaattcttgagaaaagaaaaactcattctgctgaataaaaataatataaaaaatcctgaactaagaagttcaggattttttatgtagaacgctttttaatctacaaagcaataaactgtcttcaaagtgacttaaaaatgtaagaaaagtgtcattttcaatccatagaatcgactcaacaaatatacacacaaaagttacggatttattatgaccactgcttctaaccacccaacacgtcgcgatattttaaaatggtttacggggatcccttttcttccattaggtgcgatggctacggcagcaacgttagcaggttgtaacgatagcgataacgactcatctattgtcactccgtcaaagccaattaactttaagaatgcaacgttcacttcaatgccagctccttcaacggtagcagatattgccacaacagcatgtgcatcaaaacttgctatttcatgggaagacggcagcaaaacagaatatcaactcgcttacaaaccattcttcttaacaggtacagaagtgcctgatggtaaaggaggaaaagtcatcgcgggtggttattacgatattaataataagccaattattgataaatcagttgcaggtaaagaacgtcaattcttctctgactgcccagatggtagttctctcattagtttcaaacaagcaacaggcaaagatttcacagatgctgacaagaaagcattaggtgtaaccggtaacccagtgttccatgtggttcaatttgaatatctatcaaaagaccaaaatggtggtgatacttacggtaaattatcatctccgattgctgtcttaactttagatcaagatccaaagacaggtcacttaactttaattaaataccataacgttgatacttcaagtgcacatggactatggattacttgtggtgcaagtttatctccatggggaactcatctttctagtgaagaatacgaaccagatgcttttgatcaaaaattaggtcaatcactttcaacacttaaagccttcagtaaaaatatatatggcgatgaaaacattgccaatccatataactatggccacttgccagaaattaccgtaaatgcagatggtactggtcgcgttacaaagcactattgtttaggtcgtatttcacacgaacttgtacaggttttccctgataaccgcactgtgttaatgggcgatgactataccaacggcggcctatttatgttcgttgcagataaggagaaagatttatctgcaggtacactctacgttgcaaaatatacaacagtacttagtgatacaacgactggtcagatttcttggatcagacttggtcatgcaacaagtgccgagattgaaaacctcatcaagagcggcattaaaggaactgatatttttgagtcagttctacaaattgctaaatatccaagcgatgcaacaatagcagagaaagaggctattgatgcaggcgacaaaggtactcctgagcaacaagctttagccaaagctgcaaaagagcgtttaaaactacaacaagctgcccaaaaagcagaattagaagctcaaggttttaaatttacttatttaagtaaaactggcgtatatctcaagcttaaagataatagcgacagaactaaacttgcagcggctttccttgaaacacaccgttatgctgcttacatgggtgcttcaatggcattgaccaaaaacgaaggcacaacagtaaatattgcagataaaaaagcttattcagctttagctaatattgtcgattcaatggttgaaggtggtagcggttatcttgctgagcacaacgttaaattcccgaaaatcactgctggtggtattttggagcacacattaactggtggccagaaagacagctcaaatgttgcaatcaatagtgagtgggtacctagccaatctaaccttctcattaaaggtaaagatattagctttgacagcttagggaacaccgctgacccagagcaaattgctagccctgataacttgaagttctcagaaaaacttcgcactttatttatcggtgaagactctggtaaccacttaaataacttcttatgggcttataacgttgataccaaacagctcatccgtattttatctacaccggcaggtgctgaatcgacgggtctacatgcagtcgacgaggtaaacggttggacttacatcatgagtaacttccagcatccaggtgacgaatggaaccgtttctacaaagaaaaagatggtgttcgtactggtattagcgcagatttactcgctcaaattgatactgcaattaatacaaattacagtaataaatttgcagcagcagttggctatatcactgccgacccaattgcaccatctgttgtgaagaaataatttctttcaacactataaaagaggcctgctttatgcaggtttcttttatttttaaagtctcattaaaaaaataaaattccttcaacctttcactaaacggtcaaatatttcattaacttatcatcaaaacgtcaaagcctcgtcacattcacaaactaagctcatgaagacttttagaacaatctctttatttacttaggaatttcccatgacagagctgacgccatatcatgaagaccaagaattggataataatacttctgacaatatccactttcgtgacattttagaacaacacatcagtcgtcgtagtttaatcaccaaagcagcaagcggtgcagtagcactgactttagcttctactttaactggctgtaatgataacgatgatgactctggctctaataatggtggaaccacacctgtagatccaaataaaaaaccggaaaaactcacatttacgcccgtagctaaaaatttaaatgatattgtgactgtacctgaaggttatgaagctaatgtcatctacgctttaggtgactcaatcaatccaagagttggagattgggacgacaataatattccatctggcccaagcttccagtttcgctctggcgactgccatgacggcatgcattattttggcttaaacacatcaacaaaccgctttgacgagactgtgtcagcacaaggtttgttggtgatgaatcacgaatatattaatcagaccttccttcatcccaaaggtcctacaaaagtggatggacgtcgccctgaagatgaagtcattcgtgaaaccaatgcacatggggtttctgtaattcatattaaaaaagatccaaccactcaaaaagtagagattgttaaaaactctatttttaatcgtcgtattacagcttctacagttatggagtttgcaggtgctgcagcgggttcaagcctgcttgcaactcgcttctcacctgctggacgtcaaacacgtggcactcataataactgcggtaacggttatacaccttggggcacttatttaaccactgaagaaaactttattggttatttccaacgttcgggtagcgatgaatatgcacgtacagatgcagaaaaaattgcattaaaacgttatggtttaggcgttaaaaaagatgaaccttatctgtatgagaaagatgaaaaaggtgcacctaaaaaagataaagatggcaacatcatttacttaaaagataaaaatggtgagttaatccctaacgttgatgaacaagggcgacaaatttatttaggcacaagttcgcgttacggctgggaaacagcaattggtcaagtagagtcacaagacttgtatgatcgctggaatgccgatgtaaaagcagctcaagctacccaagattaccgaaatgggccaaatacatttggctggatggttgagattgatccatttgatggacgccaaaatccggttaaacgtacttcattaggccgtttcgcacatgaagacagtgcttgccgtgccgtagtaggtcaaccattagcattttatatgggtgatgactctcgtggtgaatacatctataaattcgtttcaaccgctgtgtgggacaccaaagatataaacggtggttatacagctggcgacaaatacatgaatgcaggcaaattgtatgttgctaagtttaataacgatggttcaggtcaatgggttgaacttgcttatggcaaaaatggcttaaatgaaagcaacactacctacccgtttaagtcacaggcagatgttgttacatttgcacgcttagcagcggattctgtaggtgcaacaaaaatggaccgcccagaatggtgtacggtcaacccagtaaacggtgaaatctatgtcacactcaccaataactcaaatcgtggtaaagactatgcaactgatgcagctaacccacgcaactatacagacctatatgcaggcacaaaagaacaaaaaggaaacgtaaacggtcatattatccgttttaaagaaactgatgataaaacgactgctgaaaccttcaagtgggatatttatctatttggcgcagaagcagcaatggcttcaaacatcaacttatccggcttaacagataacaatgatttttcatctccggatggtatgtggtttgacccacgcggtgttctctggattgaaaccgatgacggcgcttacactgatgttactaactgtatgatgcttgcagctctgccgggtcaaatcggtgatggtggtacagcaacaacttcaaatggacagcaaaccataacaggcgccaaagttacagacgcaactttgcgccgtttcttagtcggaccaaagcaatgtgaaattactggtattgccatgactcctgactacaaagcaattttcattaatgttcagcaccctggtgaagattcaccaagttacgcgaaaccagaaagtaactggcctgccacacaaaaagacccaagcaataaaactgcgcgcccacgctcagcaactgttgtgattacccgtaaagatggcggcgttattgctggttaattgatttacccagaaaaatgccgatcacttgatcggcattttttatttctatcgatttaagagaacctgttgctgcacaatttgaccactatgttcaccttgctgagtcttttccaaccatatccattcattattggtcattcttaaaaaattcgaacaccgtgttccatatacggggctttgaataaaagtcgatgacaataattcttccatttccggctgaatgcccgtgtttggcaacaatgctgtggtgaccttacgctcatcttctaaaatatcccacgctgcatgctgcaaacttaactcttctgttttgtgttgatgcataggcaggaactcttgcgtaaaacgtgtacgtaaatgtctggttttttcccagtgatcggacattaaaccattcgaaaccacatatacgccgttggctaatacttgaggagcctcaccgcggttactcatatagaccgcctgatcagcagttcccataaacaggttaaaaccagcaaagttctgttgctgttgttctaattgctgagcaaagcgaatcggtaacaaatcagactctaaaaaagcctgaaccaaatgaccacgagaggtctcatattgttttttatcacgtccatcacggaaattggttaacacagcccatcggccctgcggcgtaacacccatccaagtaccacccgactgtaagtcttgccctgcaatgattggtgtatgttcccattgatacaacaatgcggttggtcgatgataaaattcatcacgatttgaaatcagacacaagggcatatcgtccagaacatgccatgctaaagccacaatacacattgattcttgttccctatgtttacacattgaatgtacaacatttttcacatcattccgctacaatctgtcaaaacgtaagatcaaggagcagcaatgctgacctatcctaatatcgatccggtcgcaatacatctaggacctcttcaagtccattggtatggactcatgtatttattggcatttttatgtgcttgggggcttgcttcctaccgtgccaaacagcgtgatggctggacatcggacatggtttccgatctggtgttttacggcgccttaggtgttgtactcggcggacgtatcggctatgtgcttttctatgagtttgataaattccttgaaaacccaatttggttattccaagtctggacaggtggtatgagcttccacggcggcttcttaggcgtcatgatcgcaatgctattctggtgtaaaaaatatcaaaaaacatggttccagacactcgactttattgccccttgtgtaccgacaggcttaatgttcggacgtattggtaactttattggcggagagttatatggccgtgcggtcacagatccgaattatccattcggaatgattttcccaaccgatccattacatctggttcgtcacccttctcaaatctaccaagcgctttgcgaagggctattactctttattattttgtggtggtttagttcaaaaccacgcccacgtatggctgtatctgccctatttttaatgggttatggtgttgcacgctttgtgatggaattcttccgtcagccggatgccgaccaaggtttcatcttgtttggctggatgacgaaaggacaaatcctcaccgttccaatgctactgataggcctttggatgatgtggtatgcctaccaaaagaaaatttatgactggggccctcaaaagaacagttaacatctaaatcagaggagtttcggctcctcttttttatgctacagtttttatctcccaagaaagaagattcgccatgctggaattctggtttaatacgcaagtcccgacttttaaaaaattaatcattttaattattaccctcttaatctgtattgggttatatcaatatcaaccattacctttagataccattttaatgtttacaggaactggggttatttttttaatctgccgttactttaaattgcattttgctcaaagtaacccgactggtttactttaccgcctatttacgtgggttcctatcgctcttttatttgcacttatctttgtaaaaaccatgcctaacttgctgatatggggcgttcaaggaatcgcttttatggcgcttgctgcttttattttttcacctcaatctttatttaacaaataggctcatttttatgttggcttattggtataacgtaccgcgtcacatcaaactcatcttcattattgtcgtttgtgctgcaatttatgcagccaatcaagtccagcctttatcgccgacttacactgttcttagtctcgtgttagggtccgggcttcacttcgggcaatatttacaaacaaaaattccagagcacagttcacataaacttaagctccagtttctgcttagaatttaccctctcattattgttgctattataatgtggttactgccccctcaacacaattggattgcaacaatacaagctttaggctttgtactggttggattttttcttgtttcgatttatcaaaatcgggccaaacgtttttaaacagtaaatgtagctctctttcctacctatcgataagcatgctattatcttccacggtttattaatccatgaaccgtctccccttttattttatggaaattaatccgaactcgagagtgttatgcgtgcatatttagaccttctacaacatatccttgataatggcggtgacaaaggcgaccgtacaggcacaggaacccgttctgtatttggtcatcaaatgcgttttgatctctctaagggttttcctttactcaccacaaaaaaagttcactttcgttctatcgtgattgagttactttggttcttaaaaggcgatactaacgttaagtacttacaagacaataaagtcaccatttgggatgaatgggcaacagcagaacaaactgcccgtttcggccgcccagaacatgagcttggcccagtttatggccatcaatggcgtaatttcggcgcaactaaaaatgccgatggtacttataaccaagatggttttgaccaaattaaatggttaattaatgaaattaaaaccaacccaaattcacgccgtttaattgtctctggctggaacccaaatgaggctggacaagttgctttaccgccttgccatacgctcttccaattcttcgtacaagacaacaagttgtcatgccagctttatcaacgtagtgctgacgtattcttaggcgtgccatttaatattgccagctatgccctactcacccatatgattgctcaagtgtgtggcttaggtgttggtgattttgtttggacaggtggcgatacgcatctttatgccaaccattttgagcaggcaaaactacaattgacgcgtgagccattaccactttgccaattaaaacttaatccggatgttaaagatattttcgacttcaaatttgaagacatcgagattgtaggttacgagtcacatccggcaattaaagcaccagttgcagtataacgacggcttaaatttcattagattacggtttagagaataagattatggcatggcaaaatgtaaaagttgtccacgttgtcgcaatggacaaaaatcactgtattggtaaaggcaatgcgttgccatggcatatctctgccgacttaaaacactttaaagaaatcacacaaggtggtgtggtgatcatgggccgcaaaacgcttgagtctatgggccgtgctctaccgaaccgtgtgaactgggtaattacccgtgacattaactggcattttgacggcgtaaaaattgcgtattcaattgaagatgctttaaatgctgctttagaagatgccaaaaacaccgaaaagcaagctttattcattattggtggtggtgaaatctttaagcaaaccttgtcaattgcagaccgtcttgagctcactcatgttgacttagatgtacaaggtgatgcacattatccaacaataccgagtgaatttcacaaaactgcaagcgaacagcaagtagatgaaaaatcaggaacttcattcgaatttgccacttataaaaaataattttctggtcgcctatgcacaatatcggaacacgtgaatttattatcgccctcctcttcggcgctttacatagtttattcacgttgtttattgtgctttccagcatttgggtatgcttagccctatgggtccaacaaccttttggctggttaggcagccgtattattattggcatatggattgcctttgctttaagtatggcgggtttatattttaatgggcatatcattagccgtcgtacagacgttttaatctacctgttagcttttgcctgctctttggtttggtacttttcgattactgcacgtcaagaccgtgactggaaccctgaggttgccaatatgctaagttacgaaaaacacggcgatgttattactttgcataatgtccgtaacttcaactggcatcctgatggaacctatgatgttcgctgggaaacccgtacttttgacctgaaccagttaaatggcataaatattattacttcttactggatggggccacaaattgcccatacgctagtcagtttcgaatttaaaaatcaacaacctttagttttttcgatcgaaattcgaaaagaaaagactgaagagttttcagcaattggcggcttctttagaaaatatgaactgagcttaattgcatctgatgaaaaagatattgtctacacgcgtagcaatatccgtaaagagcaagtttataatttcccggtcaatatgcctcgctctgagcaaaaagcgctctttttagaatatcttaaaaaagcagatgaactacgtgcagaaccaaagtggtacaatacgctcacaagtaattgtacaactttaatttttgatatggttcaagccattaacccatatcagcttcctaaagattatcggttaattgcctctggttacttgcctaattatttatatgatcttaaagcactcgatcaaaatattagcttgaaacagtggtaccaaattgcacacattaacccacgtactgaacatttcgaacaatttgcagaccaaagcagtgagcatttctctcaaattgttcgacagggtttacctaaagtaaaatgaaataagtaatgcaattttctttacttttttatacacgctttactttgtaatctaactagataaaccctattgtaataggcaggaaatagaggaaaaaacaatgcaacaggcattatttggcggcggctgtttttggtgcgtcgaagccgtatttttacaaatacgtggtgtagaaaaagtaacaagtggttatgctggtgggcatacaactcacccaacttatgagcaagtatgtcaaggtgacactcagcatgctgaagtggttcttatcgactttgatgaacaacaagttacatattctcagttacttgatgtgttctttgcaacgcatgatccaacgactttaaaccgccaaggtaatgatattggtactcaatatcgctctgttatttactattttaatgaagagcaaaagcaggcagcggaacacaccattcagacattaaaagatgatgatcttgatattgtgactgaattatcccctgctcctacattctatccagcagaagactatcatcaaaattactatgaaaagaacccttcacaaggttactgtaactttgcaattccacctaagctgttaaagttacatagtaaattccaacatctcatgaaaaattaataaatgagaaaataaaaaagcaaccgaattggttgcttttttattacgtgaaactagattttagttttcacttacaaaggcaatatcgctcagtccggcttcactggcgcgagacattacctgagcaacagtatcgtacttcgactctttatcagcgcgaagttgaactgtcggtttaaccgcaccttgacctgcttcttggaaacgtttttgaagctcatcaaggctaattacttgagtatcccaagccacttcaccatttgcattgatactaatcgtaattgcttttggtggtggatcaataatttcagcagttgttttaggaagcgttaatggaatcgatgggttggcaactgttgctgtgaccaaaaagatgatcattaacaccaacataatgtcgattagcggaatgagattcatctcattcatgccactatcgtggtcttcacccaattgaaaagccattaagcttgacctccaacataactttgctgtgcagttttaacatcagactttacagttgagtcttgctgcaacatggtgtcgattaacaaactgtgtgcttgatcttgtaaatcatgagcaaggccacgattcgcacgtacacagatgttataagccaataccgctggaatcgcaactgcaagaccaagaccagtcataataagtgcttcacctactggtgtagccacttgagctaaacctgcctgtccgctcttaccaacggcaactaacgcgtggaaaataccccatactgtaccaaacaaaccaacgaatggtgcaattgaagcaattgttcctaaaactgaaatacctttatcagcattggctttctcagcagaaatctgacgcaataatgcttgctctgcaactgctttacgttgttcaaaactcaaaggttgtaactttgctttgagcgaagtaatagcctgagagagttgagcataagcttgttgttttagttggcgagtccccatcaaacgtaagatgaaaactgtccaggtagcaatcgacattgccaataagatgaaatacagggttttactcactgcatctgcatgttgccaatagattgaaaagttcatattcgaactcctgattaaggttagccgttgggactcaaattcatttaaggggttaagtcaaacggttgctctgctttaattggataagcaacaccgttttccatataaggtttaaattttgcactacgtacagcacggactaccttgtcatctagacttggaataccgctgctacgggttacgcgcacgttagtaatcttgcctttctcatcggcttcaataagtacaacaaccgagcgtgcttcgccctgtaaatcttttggtgaaacagtcaaacgtggtgagcggctccactgtacacccgaaccaccaattgaaacgcgttttggcgatggatctggagcaggttgagctttaggtgcttcttgaaccactggctttggcttttcaacgactttttcagtcacagtagtcgttggcgttactattttcggttcaactttaggttctgtttttactgtttctttaggtgtttcagcctttttgacctgctgaattttttccacttttttaggtggagttacaggtttctcgacaactttaacctctttcacttcttttttaggttccggctttttaggcggttcttttggttttggtggtaaaggttttggttgctcttgaatttttacaaagcggacttgtaaaggtttcttttcaattggctttagttcagcaggcttaatgtggctgactgcccataagaccccgatatgaccaattgcaaccgcaattagtgccgtgatgactttctttttcatcggattgggagagtttaaggctgcggaagattgactcataagaatctaattacctaatggatgatgatttcggttttcaatttatagaaacgatttcaaacatcggatagaacaataaagtgccacaataataaatgagaagtgttttcatttgcaactacttttttatgaaaacattcctcattatcgcgaggtctaacttgataaagtgatatcaccttagttttctcatgcttagacaacgcactaaaatttgtaagttccctatttttacttatcagatcgcgctcagcttaaaaaataattaagtagctagatattaaaagtattctatagagcaacagactttagttatgttataacattttaaatttattttagccataaaaaaagcacgctcaaaagcatgcttttaaaggaatataagttgttagaaaacaacagtcttattgccatctacaataattcggtcttctaaatgccatttaacagcacgagctaatacattacgttcaacatcttcgccaagctcacgtaactgctcaacattataatcatggctcacacgttcaacgtcttgctcaataattgggccttggtctaagtcagcagtcacatagtgagctgttgcaccaatcaactttacacctttttcatatgcttgcttgtatgggtttgcgcccacaaaagcaggtaagaatgagtggtgaatattgataattttcatttcccatttagaaacgaaatcttcacttaaaatctgcatgtaacgcgctagaactaacaagtcattgccttgcatcatttcatgaatttgagcataagcttctgctttattgtctttagttactttaatgactgtaaatggaataccaaagttttcaaccgcttcacgtaaatcttcgtggttagaaattacgtgggtaatttcacacggtaaagaaccacgtgcatgacgccacaatagctcaagcaaagcatggtcaactttagaaactaaaataccaacctttttaatatcattaacaaaagcaagacgccattgcatgccataacgttccgctacatttgctgcgaaagtctgaattaaagcatctttacgagactgtaaatgatcaagttcaaattcaacacgcatgaaataacgtccgccttgagcttccgtcgcatactgatcaagcgcggtaatgtttgcaccctgatggtacaaaaagctcgatacagcctgtacgatcccaggcttgtcttcacaagtaatcagtaaacgggctgtattggcagtggtcatattcatttggttaatatcacttaattgagacaaaattttgataagccgagtattctagcgctctaaataaacaagcacaactattcatcttttagggacgataagctggcaaaaagatccgaaggtccaagcgactccaataattgctcataagtcgcgcggctttcccccattaaataagggccttctaaaaaaaccatttgacgtaaagcttgccaaacccatttttcttcaaggtggttattgtcactaatgtgtccggacatatatagaaagttggtccagttggttaagacaatccagaggttaataatgagcgcttcaatttccgatggcgtcattttcataagcccggcatcaacaaaggcctgataaattctttggccttgctgcatgacctgccctgcaaaccgaggatagatctttttaaagtcttcgttactttcaactaaatgataaacatcacggtgaataaaacgatagttccatagctgaccactgagtacctgaaaataattaattttgtcattggtcgttaatggtctgtcctcaggtaaagagagcatttctaaagtctcaacctgatattggtgcattaattccttaatgatttcatgcttgtttcgaaagtggtaatacaagtttccaggactaatccccaactctgcagcaatatgattggtagtgacagaccgttcgccacgctcattaaaaagctgcaaactgatttgtaaaatccggtcttttgtcttcagagctttaggtagagacattttaataaccttcgttaattcatatggttaagacttgcacacagaaaccaacttgactctttagagtatttactctaaaaaataagtatatcagtatatttggtaagtaccgatgaacagtcaaacaaaaacaaatccagagactcaggttccttatgatgttaagcatttacatgatttgcttgagcagcaaaagattgcctacttacgtcatccggtacccactgctaaagagcgtattgatcgtttagctcgtcttaaaagagtcttggtaaaatatcaagatcagattgccgaagcaattaaccttgattatggcaatcgtgccattatggaaaccaaaattggtgagttacttacctgtcttgaacaaatcaagtattacagtaagaacgtgaccggatggatgaaaccatcaaaacgccatatcagtgtattacatcagccagcaaaaggttgggtacaatatcaaccaatgggtgttattggcattattacaccttggaactatccattactactttccgttggcccactcatctgtgctttggcggctggtaaccatgccatgatcaaaatttcgagtgcttctccaaattttggacaggttcttgaaaatgctctttctgaagcttttccacaagaattggttgctgtggttaatggcggtggtgtgatctctgatgcgtttagtcacctgccttttgacaaaatgattttcacaggctcgacttctgttggtaaaacagtcatggcggctgcagctcaaaaccttgtgccagtcattcttgagttgggtggtaaatcccctgcgcttgtacatgcttccgtagacatgaaagatgtcgcacagcgtattgctgtgggtaaattatggaatgcaggccaaacttgcgttgcgccagaccatattttcttgccgcgtggtaaaactgccgagttcattgaaaactttaaattgattgtggctggaatgtatcctcatttccgtaacaatcaagactacacatctattattaatgataagcagtacaaccgtattcagggctatctagaaaatgcccgtgatcagggtgctcgtattattgaaattaatcctcaaaatgaaattttagatgatgtccgcaaaattgcaccgactctggttactggtgtaacaactgcaatggatattatgcaaaatgaaatttttggtcctgttctaccaattttagaatatgaccaaatcgaagaagtcatcgaatttattaatagtcgaccacgtcctttggcgatgtattattttgactatgatcaggcacgcgccgattatatctctcagcatactcattcagggcatttcggaattaacatggtgattacccatgtagcacaagatgatttaccttttggcggtattggtgcgtcaggtatgggtaaatatcacggaccggagggcttttttgggctttcgcatgaacgttcggtcatgtcaaatccaaaactttatagcttgaaatatattcttccaccgttcaataaaccgattcatcgcttcatttcgaaaaccttgttgcgttaactgatcaaggcatgatctgttatactagatcatgcctcgtttttaccaatttcgcttgtcttttaatcgtatttttggtataaaacgccccttgaatgaattcatccgtttacatttagtatgactggccacagatttgctgttggctaaatcaatggagttacaccatgtctaaggtttgccaagttaccggcaagcgtccagtcgttggtaacaacgtctcacacgccaacaacaaaaccaagcgccggttcgagccgaacctgcaccaccaccgtttctggttagaaagcgaaaaacgttttgtacgtcttcgtttaaccactaaaggtatgcgtattattgacaaattgggtatcgaaaaggttgttgcagaccttcgtgctcaaggtcaaaagatctaaggagtctgagcaatgcgtgataagattcgcctcgtttcttcagctggtacaggttacttctataccacgactaaaaacaaacgtactatgccggaaaaaatggaaatcaaaaaatttgatccaaaaatccgtcaacacgtgattttcaaagaagctaaaatcaaataattttagcctcgaaaaaaacgacttctttatgaagtcgtttttttttgcattttttttatacctgcctttttgttaaactttccacatattccgccttggcattttttatgcttgtctttagcctaactcacgtaaaaggagtttttagtgccgcatgacgtagatttaattattttacttgctgttggtttcggcgttgccctgttttttggctatattgccgcccgactacgacttccccctcttattggctatctcattgccggaattattattagtcctaatactcctggtgttgaagcagatattcatcttgcaaaccaacttgctgaactcggtgtaatgttcctcatgtttggcgttggtatgcatttttccttaaatgatcttttacttgttcgccgcattgccttgccaggtgcaatcttacaaattgctgttgcaactttactgggtattggcgtttcaatgttatggggctggagctttggctccgcactcgtttttggcttaagcctgtcatgtgcgagtacagttgtattattaaaagctttaggagaccgtggccttctagattctgtaaacggcaaaattgctgtgggctggctgttagttgaagatttagtcatggtacttgttttagtacttcttccagctacagctgttttactcggcggaaaagctccagcaggcgcagaaggtaacatctggctaactcttggaatcaccctattaaaggttattggctttatcgcctttatgctgattgtcggtaagcgcgttgtgcctattattatgcagtttgttgctcgcttaggttcaagagagctatttacgcttactgtagtcgctgctgctgtatcgattgcctatggttcttatgccatctttggagtttcaatggcattaggggcattctttgctggaatggtcgttaaagaatcagattttagccatcgcgcagaagaagaaacgctaccattacgtgaaattttctcgattttatttttcgtttcagtaggaatgttgtttgatccacatatccttattgaacgtccactacatatcttggctgttatcgcgattattatggtgggtaaaacacttgctgcaatggccttggttttattcttccgttatccaatcaatactgctttaacagtcggggccagccttgctcaaattggtgagttttcatttattttggctacccttggtgtctctttaggtctattaactttagaagctcaaaacctgattttagcaggcgcattattctcaattacactgaactctttcatcttctcggcaattgagccggtacaacgttggattcgtgaacgctctcatttagcacgacttcttgaacgtagtggtgacccattagccatgctgcccgatgaagtcgatcaatcttatctacgcgatcaagtggtgattgtagggtatggtggcgttggacgacgtattactgaaaatttaattaatcaaaatattaaagtcgtaattgcagaagagaatcgtgaaatcgtagaaaaactacgtcaggcaaatattgcagctgtaagtggtgtagcaaccgaacctggcgttttaattcaagcacatatcatgcacgcacgactcttggtaatttcacctatggatattttagatattcatcggattgtagatattgcgaagcaattgaaccctcaaattcaggttttaatttgtgcagaaagtaaagaagaagccgcagtgattagagacgaacacattggtgaagtattctatgcgaaagaagaaatggctaagaatatgagccatcatattttaaatcaaatcgaacttgcgcatcagtccacacatcattaatgcatacaaaaaaagcgtactcaagagtacgctttttttaacttaagaatttaggctgctcatccacaacttcagcctgccattcattgacctgcttttctaacagcccaaacaaagcagcttgaatcatatgttgtgcaactataggcgtctgttcacctaatattgcttttagttcatcactaaactgaattttaaccaagggctctttttcagaaccagcattacgcaaggcgagctcaccaccttctagttggaccaattccaacactgcttcttgatttccaaataactctttcaattgctgtatagacatatacttcctccatgtttcaacatggtggcaaagcacccttgcactttgcatctctcgtcttatttatataggcgcactgggattaaatttcaagcgctcagatagtttaattttagaactcgaccatttcgttacgaaaaccatcaattaaatgacttaactctctatgccattcacgcaaaattttcacatcaggtaaccatgattgtggtccctgagtcactttaatgatcaaattagaagaagtttcttcttccggtgtcggttcagttggttccggtgcatattggcacatacggtaagcacgttttaattctgcaacgaagccatcttttgccaattgctgcaaaacagaaacttccggagaaacttgtccttttgccgccatatgctcttcaatagattttaatgtcggttgcaagtcatttaaacggtaataacgtaccaattcttgcaaaaatgccaacatcgcaccatgtaaatgaaatacagctgcttcacgatacgcttgtacctgctgtacatgatcagtttgctctgcttgttgacacgctaagcgtgcaaaatagagtttttgattggtacgatcggcatgataacgagcaacacgtgacataactaaactttcctgttctaaaattgccatctatatggctattcttagcttaacgactccattgataaaatcaacgttatttatggtaaatccagagagacttgataaattttacgttatccctcatcaccatcattctttaaaaaattttggttctcaacaatgaatagatctttaagaggcagctgtgcagggacccatgaacgaacttcaagtgtttttattctctgagctatacgtgttccatttggagcaaccacagaaagagctaaaaattgttgcataaaagccttactcttcagctgccttaacccgaataccgtaaccttttactttaagtgtatttagacctttaattgctttaatggcttcacgcggattcggcatttcgacaaagccaaagccctttgatttacccgtatctttatcggttacaacgacacaagactcaactttaccataagctttaaacagctctaaaacttcagcttcagtcactgaacgatctaaattacgaactaatattttcattttccaaccttcattgaccatcaaaagaaaggccaatatacatttgagtattcacagtgtcttatacagtaatttagtcaagatcgataccaaaacctaagtttactgttcgtgaagtattccattgttttttggcaaatggctgtggtacctgacgatgaattttggcctgaaccaaatgggcaggtaaatcatttagaaaatagctttcgattttgcggccttgttcgtcatacgtgtcttgtgaccatgtattgagattttgcttcgtcaaaatcaattcattttccgcacgtgttaatgcaacatacaatactctgcgctcttcttcgacttcatcaaaatcgccctgtgcacgcgcatagggatattggtttggtgagacatgtggcacataacacactttctgttctgcacctttagcggagtgaattgtaattaaggtcactaaatcatcatcacccgctttttcaatttcagaaattgaaattggttcaagcacatattcttcaagaaactcaccaagagatgcatgcttacgcgcaagttgtttaactaggtcgaaatccctagcacgacgtgaccagtctttagttttatagttttgctctaactgttcacttaatgcatctagtgctagaccaatgcttgcctcaacatgctgctgtagcacatcaagctgtttcaaaatcaaaatggcctgcaaaggaacttttccatgacgctccaaacgctcacaacgctcttcgacctcactaatgctcattaactcttgcgctaacttgctggcacccacatctccaataccatcccataaggttaaaaagcgcatccaagccaagtcatcctgtgggttactcacaatacgtaataaactgagcacatcctttacatgcgctgattcaagtaactttacgccaccaataaaacgatacggaatttcagcggcaataaatgctccttccaaatagcgtgcgctatagcctgagcggactaacaccatatggtcgtaccaatttgcaccctgttggtgtcgctctattaagtcttgtgcaatccagttggcttcttcaaattcattaccaaacaaatggagttgtggcttttgtcctttgccacgatgagcctgtaactgtttttgataatcgattggactgtgagcgagtaaccaatttgataaatctaatatttcttgagtcgaccggtaatttaaatctaaagtatgaatcactgcatctggaatacgttctttaaaagaatgaatgttttcaaaatcggccccacggaaaccgtaaatcgactgggcgtcatctcccacacaaaataatttcaccttaccaatcagtggctgcaaaagtgcccactgtaaagggttggtatcttgcatctcatcaactaacaaagcttggcagaaaccagcaacccagttcgtcagtgcttccgagttttgtaaatgaacagcgacgatcgacaaaatgtcatcatagtctaaaaaattacgctctcttttacgctgttcataggttttcattaactcagcaatttgtgatttatattcatatgcttcaggtaattgcttgagtaacgcttcagaaagcttagattgcgtatttcgggcataagaatataaatcacatagctctgccgctttaggcaaaacattatctttgtctttgcctctcaataagcgaaacatgagtaactgatcatcacgatcaataatactaaattgggttaaaccaaacgcttgcggattacgacgcaataaatacatgcaaaaggtgtgaaaagtggatgcacgaagacctttggcttgtgccccaacatgctgttcaacccttgccacaatttcactcgcagcacggcgggtgaacgttaaaatctgaatttgatttgcaggtaaaccttgatcaattaaataagctgcgcgagcaacaatagttttcgtcttgccgcaacccgctccagccaaaaccagacagttttgagccatagtcgtcgctgcttttttttgctgagcatttaattcattaattaactttgcaagactcataacacatatcgctaaaacaccaaggcttagtttaacagacccatgccatgagatggaccttcgctcactaaaaacaaaaaagagcaccctaagtgcccttttgttcgttatttattttaagaaactgtttttgagctagaaggtaaatgcttaatcgcagaagcgagtcctaaaaagttaataccctgaaataaaatatctactgccaaaaacattcctaacacccaaaacggagaatctttagaaactaaaattaaaatacctgtagcgagggttaataatcctgaaaataaggtccagccccaccctgcaattggtcttagtaaaaatgcatttatagtgcggattacacccgcaataatcagagcaattgataataagcttgttaaaaccacagccgtagtaacaggcgtagaaaatgcataatagcctgccattaaatacagcactccaaaaagtgcccacagccatcggctaccgcctttaaatacacttaaggcagcaattaaatgcagtacaccgcccaccatcattaaaataccaaacagaaaaacaaccgaaaatgtggcaaatggcagtgagctaaataacaccaaaccaaaaataatgagcacaaagcctaatattagataccatttacgatcagcatgtagctgattacgaaccaaatcattacctacagttttcatgacggcgactcttattatcaggtattaggaagtttatataatgtcattatagtgatgcacttcacatttattgtctgtataagatgtgcatcgtttattaacaattgatgtggataaaacagtatttatccacaattttatttcagccaccccacttcttgggctgttggtaaacctatgacggtttcttgtaaatcacttggcattttgctggtctgctcagataatggtgttcgaccacccatgatttctgctcgcttttgtggataaaggggtactttttcaggttgtgcatatcctaatggatatatgggctgacctgtttttaaatcatatttatcttttgccccaaagccatgtaatagctcatgaacaattacaacctgattttgtgatgcttgcccacgtgtagcaaacaaattaacactaccaatacggcctttttctaaagcagtcgaatgcaccaaaactttttgataattgggatcgtaataatttaaataaagtttgagcgatgctccattatcttcaggctgttgttgtcgccatgcataaaaacgaaactttaaactccaccaaaccacatgaaaaataccagcattttgtggcacctcaggcggacgctgctgtaactgttgccccaagcgtatttcaaagtttgctgattggccccgataatgttgcgaccattcacttaaatagcttttaagcgcctggaaatcagtgttttgtaactgatgaatataagtttgtgtggtttgtaagccatctgcatttattgggtgtaataccaccacaataggctgattccagtcttggttttggtcacgccacgcttgaactgcaacgattaataaaacaattaatagacataaaatccgaatgtttttccacattctttttccccataaaaattaaaattttcttttattgttgtagatgtaaaaaatgctagctgagctagcattttttacctatcttatttagccttcaatccatttaccgtcttgataaattaggctccatttggtttgtttaccttctggtgtttcagaacccacatattgtgattggttcttacgactaaacttcacaatggttgggttaccttcagggtctacatctggagcttgtaaaataaactggtattttggatcaagttgatcagctacgctacgaagctcagcaacttttggtgcacgtgtttcacgaattttcgggaacttacttgcagccaagaacagaccagccgcgccatcacgtaacacaaaataatcatcatgcttggttgaacgcaagtgttccatcttgattggttctacacgtggtggtgcaggttgaccatttttcaagactttacgagtattgtcacagcttgtacaagcgaaatatgggccgaagcgaccagtcttaagctgcatttcaccatcacatttatcacaaggaatggttgggccatcataacctttgatcttgaactcgccttcttcaagctcatagccatcgcaatccgggttgttaccacaaacatgtaacttacggccaccatcaatgacgtagctgtccattgccgtgccacatttcggacaacgatgttttgacatcaagtctgctgtttcagcactatcgtcatcagataacgctgctagagactcaactggcgttaagttcaaggtccctttacagcgttccttaggcggcaagttatagccagaacaccctaagaatacgcctgtagtgcccgtacgaatctgcattggacgtgaacattcagggcaatgtactgctggtacttcaactggctggttacgacgcattccctgctcaccttgagcattggtcaaacgctttttaaaatcaccatagaatgtgtctagcaattccttccagttacgctcacccgttgctacacggtccaactgaccttcaaggtctgctgtaaatgcatagttcatcaggttattaaaactttcatcaagacgatccgttacgatctcacccattttctcggcaaagagacggcgattttctaacttaacgtaaccacgttcttgaatagtagaaataatggcagcataagtcgacggacgaccaataccacgtttttcaagttcttttactaaagatgcttcagtaaaacgagctggtggtttggtaaaatgctgacttggatctagcttttctagctttaaaatttcacccactttaattgcaggtaaaatgatatcgtcatcagatttgttggcaccacgaactttagtaaagccatcaaatacaagcgtacggccttttgcctttaactcaacattgccagcttcaactgttaaagttgaagataaatattctgccggagtcatttggcaagctacgaactgacgccaaattaaatcatacaaacgctgagcatcacgctctacaccagcaagttgatcaccagtcagcgcaacatttgatggacgaatagcttcgtgggcttcttgagcacctgctttattaccatagcgatttggcttagctggtaaatatttttcgccatattggctttcaatatgcgcacgtaccatacttacagcatcatcactcaaaaacgttgagtcagtacgcatataagtaatgaaaccagcttcatacaagcgctgcgccaacatcatggttttctttacagagaaacctaaacgtgtacttgcagcttgttgcaaagtcgacgtgatgtatggggcgcttggattcaccttagttggtttatcttcacgctgggcaactttatattcagcaccttttaatacatctaacagggcatctgtttcagctttattttttaatttaagtgttttacccgcctgtttaacagcctcaagacgaatgtcatcttttttagctttagtgtctgcaaagacttgccaatattcttctggaataaaagcacgaatttcacgttcacgttcaacaacaagctttaccgctacagactgtacacgacctgccgataaaccacgggcaatcttttcccataataatggcgaaaccatgaagcctactacacggtccaagaaacgacgtgcttgttgtgcattaacacggtttaagtcgagacgtgttggctgtttaaatgcttcttgaatggcatttttggtaatttcgttaaataccacacgatgataacggctatcgtcaccaccaatcacttcgcgtaagtgccaagcgattgcttccccttctctatccaagtccgttgcgagatagattgcatctgcatctttagcaagtttctttagttcagcaacaacattttctttgccaggcagaacttcgtaatgcgcttgccatccatgttccggatcgacgcccatacgattgattaaagcctgattcgctttttgttctttttcagcctcagtgagtttggtccgggcagccggctttttctctgttgctttactgccgcctgttggcaagtcacgtacgtgacctacagaagacttaacaatgtactgcgaacctaaatatttgttgatggttttcgctttggcaggcgactccacaatcactaaggcacgtttatgtgcagcagaggcagaagatgctgtgctttgagatgcagagcgcgaggtattcgccatataaaatgttattcctataccaataaatttaaaaatcaggcttcagccaaggccaacagataagccttcatctcatctaattgcgtagctttcaggtccgattcctcatcccaataaaggcctacacagtttgcctgcatatcaatagcataaatcccttttaatgcaatgggagaatcattaaatttctcatcgccttgcacaacttttaattttccgtctataacgcgagcacgcatgagcggtaaacgagcatcggggatcaatacactatagtaagcaaccatgctggcacgcttttcagttgccatcgggacatgtgtccattcaggtgcagcaattacgcgtggatgtagccccattttgcgggctttgtctcgcataattcccagcgccttttcacgtggactcactcttaaaccaaaaatggagcctagcacgaaaagaacaatgataacggtaacccaaattccgatattgtccatagcaaaacctattaatctcttttattagagttgcataagctgaccagaaaacgcaagttacatcataaaaataatgtccaattaaccgacaaggctaaaaactacaacatttcctcatagatatttttaacaatcgaggcagaatatttaggcgctcttttcagtttcaagagtagttaacttaccaaactgatccagatgcgcatctccccacgtttttaaagcaagaagtatctgctcaagcccgcgccctaaatcagttagacaatattccactttaggaggcacttgaggataaacctcacgatgaataatgccatcttgttctaattcccgaagctgattggtcagcattctttgtgtaatgcttggaactcgtttacgaatttcattaaatcgtaaagttccttcatttaataaatgccaaagaatgacacatttccatttgccatcaatcaaactgattgcggcctcaactgaacaacctggtgagcagtcaaaacttgaatgtcgagcttttgccattttacagtatcctttttgacactatgagcgttatttgtctgtagtcactatttttaagcttacgttatgatcaaactctcaacaagaggaatgatgattatgaaagctgtggcatatcaaaaagcggggcctattacatccccagaggcactcgtagatattgaaatcgacactccagtagctaaaggacatgatttacttgttcgtgttcaagctgtatcagtaaatccagtcgataccaaaatacgtaaaaatgtaagtgctgaacaatctggttggaaagtacttggatgggatgctgtaggcacggtagaagcgattggcgataaagttactcaatttaaaattggtgatgtggtttggtatgcaggtgctttaaatcgccaaggcagtaatagtgaattgcaattagttgatgaacgtattgtcgggcataaaccaaagactttagaagtgactgaggctgcggccctccctttaacggcaatcacagcttgggaaatgttatttgatcgtctacaagttccaaagactgcgcctactaatacgactattttagtgattggtggagctggtggggtaggttcaattaccattcagcttcttaagcaattaactaacctcacgattattgctacagcttcacgccccgaaacaaaagaatgggtagaacaactaggtgctgactatgtattagaccaccgtcagcctttagctgcacaaattaaacaattaggtttaagtgcacctttatatgtattctcaaccactgaaacagatcaacatttatcagatattgtagagttaattgctccacaaggtcattttggacttattgatgaccctgatcagttagatattaaaccgtttaaatctaagtctgtctcagtacactgggaatttatgtttacgcgctccatgttccagactgaagatatggaaaaacaaagtgagctactaaatgaagtcagtaaactggtggatgaaggtaaaatcaaaacaactgtgactcaggttttaagcccaattaatgctgaaaacttaacacgggttcatgagcaaattgaaagtggttcaaccaaagggaaaatcgttttacacggattttaagttgcacttttgaaaataaatggcaagcgtaacgcttgccattttaattagtaatgcggtggtttattcgttaatggatcaaaaggtgcaacaccttctgataaatctgcagattccacacgttgataaagtaattgcatttgtttttttaaatcagctatttctaaagtttgaatcgcgagttgctgatttaattcctcaactaaatcatctaaaaatgcaattcgcacttgcaaatcttcaatgggtgcggaaaatgacgcttgatcatcatgatatggtggtttagtcatttaagtcctcatttgagattttggaaaacattatggcctatattactttaagggatgtccaacttgcttttggcggacctgccctgctcgatggcgcgaacttcaacctagaacgtggcgaacgagtctgtttaattggtcgtaatggtgaaggtaagtctactttacttaaactcattgagggaagcctactaccggattctggtgaagtttctgtccaaaatggtttaactgtttctatgttagcccaagatgttccaatgtcatcgggcaaagttgcagatattgtagcagaaggtgcaggagaagccgctgccgtgcttaaagcctatcatgaagcaagtgatgcctgtgtacttggtgacatggaagcttgcgatcgtatgggatctttacagcataaacttgaccaacttgatggatgggcattagaaaataaggtcaacacgattttaggtaaaatggagttagatccgaatgcagatctagccgacctatcgggtggtcgtaaacgtcgtgttttacttgcccgcgccctacttactcaaccagatgtgttattactcgatgagccaactaaccacttagatgttgaaagtattgagtggcttgagaaattcctgcttgatcaaaataatttaaccttactctttatttcgcatgaccgttcttttgtagaccgccttgcaactcgtattgtggaattggatcgcggcatattacgcagctatgaaggtaactattctcgttatcttgacctaaaagctcagcagcttgaagctgaagaaaaacaaaatgccttgtttgaaaagaaacttgccgaagaagaagcatggattcgtcaaggtattaaagcacgtcgtacacgtaatgaaggtcgtgttcgtgcccttaaagcattacgagaagagtcaaaagcccgccgtttccaacaaagcaaagtcaatatgggcgttcaagaagcacagcgctcaggcaaacttgtatttgatattgaacatttaagcgtaagttacgatggacaaaccctcattagagatttctctgccattgttatgcgcggtgaccgcattggtttggtcggtgataacggcgtaggaaagactactttaattaaagcgatcttaggcgaagttcagcacgaaggtgttgtcaaaacaggaactcagcttgaaattgcttacttcgaccaattacgtaatcagcttgatcttgaaaagtcggtttctgaaaacgtttctgaaggttcagatttcgttgatgtaaatggtcaacgtcgccatattctcagttacttacaagacttcctattctctccggaacgagctcgtacaccggtgaaagcactttctggtggtgagcgtaatcgtgtcctgttagcaaaactgttgcttaagccatcgaacctgattgtaatggatgagccaacgaatgacttagatatggtcacacttgagctacttgaggagatgttgtctgaatataaaggtactttgcttctaattagccatgaccgtgcttttatggacaacgttgtgacatcaacttgggtatttgatggcaaaggcggtattgcagaatatatcggtggttatcaggactatttaattcagcgtccaaatgagagagtcgttgaccaaaaaggcgatgtaaaaaaagctcaggctaaagcagaagctgaaaaaaatgcagctcaaacgaacgtaaaaaaggtcaaattaagctacaaagatcaacgtgaacttgagcaattaccggcagaaattgaaaagttagaaaatgagcaagctgaactttctgacaaacttgctgacggctcctggttcgtaacggatgccgatgcagcaaccaaagcaagccagcgtctagcagaaattgaagagttactccttgaaaagttagagcgctgggatgaacttgagcaaatgggtaaagggaattaattaattttttacctgctgattaatttaaaaagcctcctagattagggggcttttttaaatataatttaagatattttttcaaataagatttataaaaataattatgttatacctatcagtataataatatttaaggatatttccatgctagatctctctcaaattttggcatttggattcatttgtctggcgatggtactcacccctggcccaaacatgatttatcttatctctcgttccattagtcagggcaaaatcgcaggatttatttctctcggtggcgttgccgttggttttgtattttacatgctctgcgcatcttttgggattacagcacttgttgttgcagtaccttatgcatatgacactattcgtattgccggtgcaatgtacttactttggttagcatggaaagctttacgtcccaatgccgcacctatttttaatattaaagatttggcggttgactcaccattaaagttatttttaatgggctttttgactaatttacttaatcctaaaattgcgattatgtatttatctttattacctcagtttattcacccacaacaaggcagtattttagcgcagtctatccaactcgggactatacaaatttttgtaagcgtttcagtaaatgcgctgattgtattttctgctggtagcattgctctttttctacagaaaaaaccactttgggccagcattcaacgctgggtcatgggaacagtattagccggtcttgcggttcgtattcttctagaacaccgtcgataacccgctttatttttctttatcgcgtctaaaccttcaatttactcctgtgtattacgacgataaattcagttcgtgatacacttttggcagttttaattttttaaattctttatatcgttatgagccaaaagcagccttatacgcccggtgagtttcaatggtcctttttgttacctaaatattggggtgtgtggattgcgattactttcttgatgcttttggctattttgccgtgggcaattcaatggcgcttagctcatggattggcaaaccttgcttggaaatatttaaaatctcgtcgtaaaaccacaattcgtaatttagaggtttgctttccagaatggacacctgaaaaagtacagcaacaagcaaaacaagtttttgtagatatgatgcttggtatttttgagaccttaaacgcatggtataagccttactggtttaaaaaccgtgtcactattgaaggcttagaacacattaccaatgcacaagctcaaggcaaaggtgttttattgcttggtacacatagtactttactcgatgcaggtggttatgtatgcgcccaatatttcgagccggatgttgtgtatcgccctcaaaacaatcccctcctcgatatgctaatttatcgttgccgcggcacaatttataaagcacaaattgatcatgatgacatgcgtggtttgattcgtcatcttaaagagggtgatgcaatttggtatagtcccgatcaagactttgggcttaaacaaggtattatggcaccattttttggagtgccagctgccactgtaaccgctcaccgtcgtttattaaaaatttccaaggcggttgctgttcctttatatttttatcgtcatggcgatgtgcaagatcctaaatatcatattctaattgaacctgcggttgacaatatgccaagtgaagatgaagtcgatgatgcaacgcgtgtgaataagattattgagaaccagcttcgtatcgcaccaactcaatatatgtggtttcaccgtcgttttaagacacgtcctgagggatatgaagagatttattaagataaggctgtaataattttagattagtaataggcacagcctcgatttaaagtgatattcaaatactttcggataggcagaccttactttttagggataaaaagtaagcaaaaatcctttgttccgctgatgttacatccttgtaacacaacgcaacagcgacatccatgtcgctatcacgatagtaaactctggataatgatttagtttgagatgatgtatctatggatgatccatcttttatgaacgtataaggcaaaaaacaatgaaagtgatgcaacttctcccagaacttaatagcggtggcgtagaacgcggcacactggaaattgcacgtgcactggttgcacaaggtcatcagtctctagttgtgtctaatggcgggcgtttggtctcacaacttgaagctgaaggttccacacacttaacgctgcctatccataaaaaatcattgtcaagcttgtggcaaatccgtccattacgtcagctgattgaagagcaccaaccagacattgtacatgtgcgctctcgcgtacctgcgtggctaacccacttcgctttaagaaaaataccagcgaataaacgccctcacctcattagcacggtacatggtttctattcagttaatcgttatagtgcgatcatgactcaggcagaaaaagtgatcgctgtttctgacagcgtagttaaatacatcacagaccattataaaaactgtccaccacaagatattgtccgtatttatcgaggcattgaccctgctgcttttccgcataactaccaaccttcagcacagtggtttaaccaagtttttaacgactttcccgaactcgagaataaatttttactttgcctacctggccgtattactcgtttaaaaggacatgaaagtttaattgaactgatgcaaaaactaggtgaacaatatcctcaactgcatgctgttgttgtgggtggggctgatgtaaaaaaacaagcctatttaagtgagttgcaaaacaccattcaaagcaaaggacttgcagataaaattacctttgtaggacatcgctcagatatacgcgaatggctcgcttttagcgatatagtgctctctctatccaatcaagcagaaacattcggtagaacagcattagaagccctttcggtaggcacgccggtcattggctggaaccgtggcggtgttgccgagattttatctcatgtatacccacaaggtcttgttgaagcagaaaatgaaaaagctttagtagaaacagtaaagaatcatattgaacaaccgcaaacagtcgctcctgtgacaatgtttagtttaaaagatatgtgtgaccaaacccttgagctatatcaaagtgtattgaaataacccaataaaaaaacccgcgatgttcgcgggtttttttcgactaaaaaacttctctattacttaagagatgcttcataagcagcagctttttcatagtcgtattgtttttcccatttactgattacaagtacagcaagcgcgttacctacaacgttcaacgcagtacgagccatatccatgatacggtcaacaccagcaataaatgctaagccttctacaggaataccaacactacctaatgtcgccaataacacaacaaatgataccccaggaacacctgcaatacctttagaagtaatcattaacgttacaactaaaatcacttgttggctgattgtcatttcaatgccgtaaagctgtgcaataaagattgctgcgatactttggtaaagcgtagaaccgtcaaggttaaatgaataaccagttgggattacaaaactagaaatcgcttttggcgcaccataagcttccattttttgcataatacgcggtaaaactgtttccgaacttgcagtcgaatacgccaaaattaattcatctttcaaaatcttaaacaaagtaaagatattgatgctgaacatttttgcagtaatacctaaaaccactaaagcaaagaataagattgcaccataaactaatacaaccaacttacccaatggaataagcgaagcaaaaccgaagtttgcaacagttacagcgattaagccaaatacacccactggcgcatatttcatgatgatgtgtgttacacggaacattgtttccgatacagcatgaaatacatttaataatgggtcttttgttgttgctggtaatgaagataaaccaataccaaatagcacagcaaagaaaatcactggcaacatttcgccatgcgccattgaactaataatgttcgttgggataagcgataatatcgtctggataataccatgagactgtgactgtacttcttcagttgtatgcttatattgagaaatatcagtttgtaccagttgagacatatcaatgcctgaacctggatggaagatattcgctgcaaacaagccaaccaaaatagcaatagtagtaataatttcgaaatagagaatggttttaaaaccaagacgccctagactttttgtactgccaacaccagcaatacctaaaatcaatgtagagaaaacgattgggattacaatcattttaatcaggctaataaagatcttacctaatggagtaagaacgttatttacaatactatctttgatttcaggctggttatgtaaaacagccccgacaactatccctaggattaaagcaattaaaatttgccatgcaaggctaaatttaaaattcttcataagacaatccttatgcaccgcaaagtatcaaatatgagagggagaagaccactactttagagtgaaacctcaatatgtacacgaatttccaaacagaaatttaaatgcacaagcaaatcacaacccgccgatccggcgaagtaaacaacaatgcctgttgacgatccaacatgtcaacgatcggcacattctattgagatttgccaattaaacaagtccaatttatatctaaataggtcaaagcctagatttatccgtcaataatctataaaaacaaaaacttaacaaaaaagttttttgtatccattttcattaaaaattgctcagatatataaaaaaatttatggacgatgacttataactgagtagatttttaaattaagaataccttaaaaatattggttttatttacaacgaattaaatgatatatctataaaatatcaacccgagttctgcgtcctgcaaaactcgggtaaatgaggttgtgctttcagggtatataattctttttatcgcttccgttctaacatcttatccgtgatgtcgttccatatcagcttagtgcatccttacttgggattatccattcccgcttccgtgtgccgatgaatgtagaatacgggttttaactctgtctgcctattggacctagactcaaatctttgtacgttattgcttacaactcactttatatatttttctctttataaggctgtgcaatttcatcagtcacgattttttcttctttttcagctttagcaataccttcttgtatcgcggcttgagcttcttcttcatcggcttgagtttgttctagttcctcgtgaatttcttcaaatattcgacctgtttgtaaaacgacatagacaggaaaatggtctgatccaatatgagataaacgctgcatttttactaaaccgaagtctgtactatgaaagatatggtcaagtgaccagcgcaataaaggatagtccgcatgaaaagtattaataaaatgccgccccactcgtggatcgagtagcccactaatacgttgaaataaacgggttgttcgtgaccacgctacgtcgtttaaatcccccatcacaatacaactttcatcaagatctttaatttgatctccgacaattaaaagctcagcgtcacgcagtgttgaatcttttgcttcagttgggctaggtggcttaggatgtaaacagtagagctgaacaggcatgccagatcgcaaaattaccgtggtatgaatagaaggtatttcattacttaaaatgaatttaacctcagtatttttaagcggtaaccggctatataaatgcatcccgtataaattatctaaaggtacgggcacacggtatggataatctttctcgatctcttttaaagcattttcccaagttgtatcgctctctaaagtaagcaataaatcaggtttcaacgtccgtacatgctcaagtaataaatgatatttatcattcggggtgagcacattagaaactatcagtgaaatctgttttgtaggatctagctgatgctgtttgacctttttaacctgttttttccaaaacagcgtatacggtaaaaccattttaagttggtaggcaatcgctgcgatgagtaccgcaagcaaaagctcacgccatacgtcccattcggtcggccaaaacaacataccaattaaagcaattaagccaataaacagaatttgtaatcttggaaaatctgcacctcgaaaccaccactcatcacgaggaataagtgaccagaagcttaaccaaatcaccactactgccagtacttcgatataaatcattgaaattactcttttaagatgatttgttttttaatgtttttgtcatctttatcaattttgtatgtaacataaacaagatattctactcaataaaattgctgttttgattctgtaacgcttgcagttgtgagcacttttgatacactcaactccccctttaacaattttaacgcaccgaggcaaaatgacatgaaagtaggtctggtcggttggcgcgggatggtcggttccgtccttatgcaacgtatggttgaagagaatgattttgctcatattgagccattctacttctctaccagtaatgcaggtggtgaagctccttcatttggtggtaagactgccccagcacttatggaagctacagacattaccagtctgaagcaaatggatgtcattattacctgtcaaggtggtgactacacgtctgaagttttcccaaagttaaaagcaactggttgggatggctactggattgatgcggcatctactttacgtatgactgatgatgcaatcatcgttcttgatccggttaaccttaatgtaattaaagacggcttagcgaaaggtactaaaactttcgttggtggtaactgtacagtatcactcatgttgatgggtgttggcgcacttttccaaaataatttggttgagtggatgactgcgatgacttatcaagcggcatcaggcgctggcgcacaaaacatgcgtgagttgttaacaggtatgggttatttatataacaataccaagactttgttagatgatcctaaatctgcaattcttgatattgaccgtcaagttgccgagttacaacgcggtgagggtttcccttctgcgaactttggtgtgccacttgctggttcattaattccttacattgataaacagcttgaaagcggtcaatcaaaagaagagtggaaaggacaagttgagaccaacaagatcttaggtaactctcaaatcgttcctatcgatggtcactgtgttcgtatcggtgcaatgcgttgccactctcaagcattaaccatcaaattgaaaaaagatgttccgcttgatgagatcgaagatatgattcgtaactcaaaccagtgggctaaagttgtaccaaatacacgtgaagcatcaatgactgatcttacacctgttgctgtaactggtaccctaactgtacctgtaggtcgtttacgtaaactcaatatgggtaaagagtacctcggcgcattcacagtaggcgatcagttactttggggtgctgctgagcctctacgtcgtatgttacgtattttagtagaatacaaaagctcataatttgatctgaattattcagtcaaaataaaaagccgatcacatttgatcggctttttcgtaactggtttgtaaaaaattaacaatttatttacatttcattattgtataattttgaacgactttacgactgatcaggtcatggattgagatgactgcatataacaaattaaaaattgccattttcaccattatgtcttcgccttctatttatgcgattacattagatcctattcaaattcaatctgcacctggggaattactttatgcagaaatgaattttcagcaagcagatcctaataccccattgcaagtcagtttggccactcaagatgatctcaatggtttgggagtaactcatcaacctccgggtaacctaaacttttatacacgccaaaatggtcagggttctggcgttattgtgattacctcatcgcgtcctattatcgatcctgaactgaatattgtcgtaaaagtcagtgaaggtaacgcaacccgtcttcaacatattaaaaccgttttaaagccatcgcctataaaaaaggccgccatgaacgaaagtccactttcaccgcaatttatcgtaaatgaaaaagatatcgcattaaatttacctgaaagtactcagtacacatctactgaaaatacatcaacggtggcagaaaccacaagtaatgaacataatctaaatattagcactggaactgctccagctttgaatagttctagccctgctcctgtggctccttttaccgaaaaaccttcgactcaaacacttcagccaactatagctacgatgaataccgaatcatcggctgtagagaaacagccttcgacttcactcaaatcaagtgatggcaatcaaacaactaccgtcaaaaaagcagcgcaatctaaaactgcccaacaaaaaaatgtattaagtaaaaatacgccgaaaaagcaaaaaattagcgcttataaaggcccggcacctactggtaaatatgtcgtacaacgtaacgagtctttatggagtattgccaatcgtattgcagcacagaccaaacaacctgtggctaaaatcatgcgagatatccaagcacaaaaccgacatgcttttattcaaggtgatgtaaaccgtttacgtcagggaagttcgctaaacttaacaacaaatacaactaaagcttcccatttaaaacctaaatcgagtgaagctcacttggcaaaaccctcttctggcagagctaaatatcgtttacaacaagctgaaatgagcattgtggcagagaacagcccaaattctgctcatggaagtgcaaaaaagagcacacaacaaagtcaaaacaatactgagttagcagtaaaagttatgacaactcgcaaaaaaaccgttacattacaaaggaatgtaaccaaactaaatcaaactttaagtttaaaagaccaacgtattcaactcttgaatgcgcgtttggcagagttacaacagcaattacaggcacagcaacaaactcacaagcaaaaacattaagttaaaaccagagttagcacgctttatattgcaaatatttattttttaaggggaaagtaatgttatatgtgattccgtttatcatattactcgtggtcgccgttattttaaaaaaacgcgagaatagtcaaaaacaagaggccacttccccaaaaaatataaatagaaaatccggcaaaaaagcgagtgctaaatcaagcaaaagttcgcgtgaaaaaacaaaagccaaggtcattgaggaaaatactcctgctatccctcaaagcaatcctgtacctgaagctttgcgacacaatattcaacagctcattcaagaaaaacagttttcagcagctgaagctcaagtcaatcaggcgctaaaaaaagataatactcaacatgaactgtatttattacttcttgaaattcatattgctcagaaagatgaatttgcaattcaacagttgattagccatattcgtagcttaggtttaaatgaaatagcagctcaagcagaaactcgacaaaaagaatatgaatcatccagacaacctgatgctattgatttccctcaagctcaaacatatgaagaaccgaaaaacacagatacaacggctcagttcgatgaattaacaaccagttcttccgaggcttcttttgatgacctacagaaagactatacgcccgtaaaacaagaacctgctgttgaaattgaacctttagagtttaacttttcattcgaacagacttcggctacggaaaataccaaccaaccagcacaacaacctgagttatcatccactcaagaaacaaatgagctggccgatttagagttttcttttgacttggcacctctgcatggaactgaggaaaaatctcaaccagtagagctaaaagcagaccaagaaaatagcatcaatgcattagattttaactttgacttaaatccttcaagttcagagacgaaatctgttgaacaagctccatcattagatgaaattaaactcgtagaacaaaccccattagaagcggcttctatcgcacctcttgagttttcgttagatgagcctgccttagttccagcgccagagcttgaaactcaaagccatatagatgtagtaaatgaagcagctactcaaacccaaatagaggatccgcttttagaagcttttccagaattaaaacaaataaatgaaaatgaactcgatttaaaattggctgaacaatacattaagtttggagcgaaccaagcagcgtgtaatttactacagggtgatgagcaaaaattcaacacagaacaacaacaacatgcgaaaaacctacttaatcgcatagcttcttagaactgttcgatttaccataagcagtcagagatgactgcttttttatgcctgcaaaaagatgaaaaaaatagctttattttatatgggtggtacttttggttgcattggtgaacctttagctcctatgccttatgaccaattcctacctcaacttgagaaagtgattcccccacacttaacagttcattgctttgctgcgcccaatattgtcgatagcagtgcatgtacagcacctgactggttacgcctaattcaacgcatacaacaactacaactagaaggctatcagcattttgttgtgattcatggtacagatacgctcagttatgcagctgcgactttagctcgctttttagggcaaagctgtcatattgtgattactggtagccaatacccgttactcaatattcaaggtgataacacccgtgaatttactgatgcaattgaaaacttatatcttgcattagagcaggtcattgcacttccggttggtgcttatctcgcattccaccatcaagtatttcacgcacaaactgcattaaaaacgcataccactgaacttgatgcattttcagggttaagtagtaacgttgagtttacgcctcagcaaaatgaattgatcgtacaagatgctcaaattgaaaaagctgcttcctttcagattttaaactggatgatgcagccgattgcaacacagcatttagtacaacaattacgtcacttacttcctgccccaccacactttttagtgttgcaaggtttcggtacaggtaatatcgccgtaaacgatgagtttttggcaacattagatgaactctatactcgtggatgtgtaccaattttggcgacacaagtcacttttggaggtatggaccaacgttatgcaattagtgcttgggccaaaactgcaaaaattgtcattaatgatgcccatagccatgcagatctctatgcaaaagcgcttcaaatctatttaaaatacccaaccccagaacaatggttgaaccattggaatgaaaatctgcattaaatagaggtgaagccatgcaacgttatgcggtcggtattgaatttagtggtattcaatatcgaggttggcaaacacaacagccaggcgttgccagcgttcaggaaactatagagcttgtactcagcaaaatcgctgatgaaccaatcacacttcacggtgctggtcgaacagatgcaggagtacatgcaacaaatatggtggctcattttgacactaatgcgattcgtccagagcgtggatggatcatgggagcaaatagccaacttcctaaggatatttcaattcagtggattaaacagatggatgaagagttccatgcacgttttaaagccactgctcgtcgctaccgctatgttgtatataacgctccacatcgccctgcacttttacataaacaagtcacgcatatttatcaaaaattagacgtgcaaaaaatgattaaagctgccagcaaatttgaaggtacgcataactttgaaaccttccgtgcagcagcctgccagtcaaatcaacctgtacgacatgtaaagcattgccgattgtttgaacatggacgttatttggttttagatattcaagctgatggctttttacatcatatggttcgaaatattatgggttgcttacttgaaattgggcaaggcatgtatgaaatcgaccatattgatgcaatgttcgcagccgaagatcgtaaggcagcaggaattaccgccccacctgatggtctctattttattcaatgttattatcccgagcagtttgacttaccacaaccaccactcgggccacattggttaaacctacctgagtaggcttaaccaatttttagttctaacggtgttgcttacgcttacggtactcaactggtgtttcgttagtccagcgcttaaacgcgcggtagaatgtactcggttcagaaaaacctgttaaatacacaatacgctcaacactctcattagtgttagctaaaagttttttagctaaacgacaacggtagtcagaaagtatttgctggaagctggtatttgcttcacttaactgcgtccgtaaacgacgcggcgtaatatttaattgtgccgctacggtttctagcgtcgtttctccactttcaagtgtcgaaccaatcgcacgacggacctcacccactaaatcataacgggcaagttcttgtaacttttcaattgccaattgttcatgcaattgaagtaattcaggctctgcctgccaaagctgaaaatctaaaatggcagggtcaaaatatagccgtgtttctttctgccctaagcttaccggacagccatagacgcggaagtattcatcttcagaagcaccttcactgaaattaaaatcaatgaagattggatggaactggccttcggtaataaatttgaagaatctgagcacacctgaaatcgcacattctgaaaaatgacgattaacaaggttgtctgcccctacctgctcaccattggtcaaatagcagcgtccatcttcaaccaccagttttgcatcaaatgcatcactaatgagacgctggtaagccaaagctcgcttaagcccttcaccaaaagtttcactactaataaataaatgttcaatcacctgaccacggtacaaaggtaaatgctcacctaaatgcaaaccgatgtctggatctttactgacttcttgagcagcagtccaaaaggcatactgcgcacttaacggagtacgtgcgtttgtatcgacctgatttaaagcgactcccgctttagttaatatttcttctgttggcaatcctgcacgacgaattgcttgatagccaaaacgtaatacaactgatgcatctgttagctgacccacgcagtgcccttccatgtagatacttcattgatacttaggagctgttgactctttatgcatgaacagtccctaataactatgattttagattagcgttgattgaccaaactgacaacagaattagagttcttttgtgaaaaaaattacatctttttttattagtcatactttaaccagatgctttcacaagaagatgtctatcttgttttttttaaataaattgactataatttgcgcctttccaatttgatcatcaggtaggctatggccaataaagaggaactcattgagttcgaaggcgttgtcaccgaaacgcttcctaatacgatgttccgtgtacgtcttgaaaacggtcacgaagttattgcacacatttctggtaaaatgcgtaaacactatattcgtattcttactggcgacagtgtgaaagtcgaaatgactccatatgacttaaccaaaggtcgtattacgtaccgtgctcgctaattagtgaatgcaaaaaagccacttcatcatgtggcttttttattgcgttttttattcacttaatcgactggttttacatcccaccgtttggcattcacgcaatctttcttgcagccaatggtttctttcttgcgttgtctgtaaacgacactgcacgtctacgctatttctattagaatctgtacattcagcatcacgttggcgtatccaagcaagctgcgacttcttaagcgtatttctttgtgctgtatttaatttcgctcttaatgcctgataattcttattcaggtctgcatcagcactcgcatagattttattggtacagtaaatatcatcataagtattacgagcactatcacagttatcagcatagaccgtggttattccgaaacacaaaaaggcaaaaactatttttttcatactcttcttccttaagttttgggcaattattattagtctgtaaatataagaataagtctaaaggcaaactcaccttctatttatcataatcctgcttttttactttacaagttagcaaatccaacctattgttctttaatgataaatataattctatatagagaaaaaatgaatatatctaccttatgtcaaatgagtttgctttcattcatgctgcttaatattaacggctgtgctagtcatccacgccaatctatagatttacaagaatatttaaaaaattttataggcaaatcatctacaacgattcagcaagatctcaacttacggagtcttggctttcaagtcgcccgcacaccacaaaaaacttctgatcaacttatttatacaattttacggcccttaagcatcccaattccaatggtgagtaatgtcgatatgagaggtggttctgttcccatacaatcaggaaatttgagcggcaactcttatgatcttaactttaattgcaaggttatttttaaactcaaaaatgacattgccgagtctattcaatacgaaggtaaagcttgctaaacacaaccataaaaaaacgcagctttaagctgcgttttttagcaaagtggcgattaagcaagagcagcaacaactgcttcacccatctcggctgtaccaactttagtcatgccttcagacataatatcggctgtacgtaaaccttgatcaagtacttgccctactgcatcttcaattgctttagcagcagcttcttcacggaaggtataacgaagcatcatcgcaactgaaagaatggttgccaacgggtttgcaacgttttgccctgcaatatcaggcgctgaaccatgacaaggttcatacatgcctttgccattttcatctaaagaagccgatggcaacataccaattgagccggtaagcattgctgcttcatcagacaagatatcgccaaacaagttacctgtcacgattacatcaaactgtttaggcgcacgtacaagctgcatggcagcattatccacatacatatgtgaaagctgaatatttggataattggcttgctgtaaatctgtgaccgtttgcttccaaagctctgttacttctaaaacattggctttatctacagaacacactttaccgccacgtaatcctgcaagttcaaaagcaacttttgcaatacgcttaatttcgctttcagaataaacgtcagtgttatagccctgtttttcaccattttcgagttcacgaataccacgtggttgaccaaagtagataccaccagttaattcacgaacaattaaaatatctaagccagcaacaatctcaggctttaagctagaagcatcggctaattgtgggtataaaatcgctgggcgcaaattagcaaataagttaagttcactacgaatttttaaaagaccgcgttcaggacggatagaacgttcaatagtgtcccactttggtccgccaacagcacctaataaaatggcatcagctttttttgcttgctcgctagttacggctggatacggctctccatgagcatcaatcgctgcaccacctaacaagccatgttcccaagtcaacgacaaattaaatttttcatttactttatttaatactttttctgctgccccaacaatttcaggaccaatcccatcgccagccaaaattaaaatctgtttagacatgaagttttccattttcaaagacaagacagcgttacgactgccgtggtgttagttttttctgttcgagaaattcacctagtcctgtggtgacatcaaatggtcgacaaaaacggcgaattacccgcccatcctgctctaagtcaacacataatggatctggtacagaaacattcagcaaactacccgaacggttagatttgtctcggtacattttaaacatatagcgatggttagctttgaattggtgaataacatgaatcgtttcagcccgatctggagaaatcggatagtaacgaatcaccacttcatattgtttggcaggcacagatagatacaaactattgctttgacttaacaccgaaccatttaatctcacaattccttgatgaattgcctgattactaatacgacgtgtctgtgcatcaacaacagtaatatcatttagccgttcaaattcgcaactttttgcgcccgaacaatatattgctgcattctgccccaaattttcttgttcagcctgcttaatacgaacagtatccactacattgtaagtgctctgacaagcacttagtgttatcgcgcacaggctcaacaaaaagctatgagtaacgttcctcttcattgttcaagcccaatcctcatctagtgcataattttaagctgttgttatgctttagcatgttagcaagagtttgaacacgacgccatgactatgtttaaaatgtaccgaaaggttaatttatctcttggaatacccaaggacgaacctgtttggttttttcttcataagcgcggattgcgtccgcattttgaagtgtcaagccaatatcatccaaaccatttaacaagcaatgcttacgaaatggatctacttcgaatttaaatgcttcgccagttggtgtacgaacttcttgcgcagccaaatcaattgttaattgatatccttcttgcgcagcacattccttaaataactgatcaacaatgtcttcaggcaaaatgactggcaacataccgtttttaaaacagttattaaagaaaatatcagcaaagcttggcgcaataacggtacggaaaccatattcatttaatgcccaaggtgcatgctcacggcttgaaccacaaccaaagttggtacgtgcaattaacacggttgctccttgatagcgaggctgatttaaaacgaaatccggattttttggacgtaccgagttatcttgtcccggatagccttcgtctaaataacgaagttcatcaaataagttgtcgccaaacccagtacgtttaatcgactttaaaaactgttttggaataattaaatctgtatcaacattggcacgatctaatggtgcaacgataccttgttcaactgtataagctttcatggtttgctccagaccgaattaaaatgaacgaacgtcaacaaaatgacctgcaatcgcagccgctgctgccattgccggactgaccaagtgagtacgaccaccattaccctgacgaccttcaaagttacggttcgaggttgatgcacaatgctcacccggttgtaacttgtctgcattcattgctaaacacattgagcaacccggctcacgccattcaaaaccagcttccaagaagattttatccaaaccttctttttcagcttgttgtttaactaaaccagaacccggaacaatcatggcttgcttaatgctaggtgccactttacggcctttaactacttcagcagcagcacggatgtcttcaatacgagagttcgtacaagaaccgataaagacacgatcaagttgaatatcagctaaagcttgtcctgcatttaagcccatatactgataagcacgtgtccaatcattacgttgtacgtcatctttcgcttgttctaaagttggtacagctttcgagacaggaataaccatctcaggtgaagtaccccaagacacttgtggttcaatctccgcaccatttaactcaactacagcatcaaaaacggcatcaacatctgaatgtaaagtgttccagtaagcaacggcttgttcccactgctcaccttttggtgcgtagctacggccttttacgtattcaatagtcttatcatcaactgcgaccatacccacacgagcacccgcttcaatcgccatgttacataccgtcatacgtccttcaatcgacatatcacggaaaacttggccaccgaactcaattgcataacccgtaccgcctgcagtaccgattttaccgataatggccaacacgacatcttttggtgttacacctttacccaatacgccatcgacgcgaaccaacatgtttttagattttttctgaaccaaacattgtgttgctaacacatgttcaacttcagatgtcccaataccatgtgccaagcaaccgaaagcaccgtgagtcgctgtatgtgagtcaccacacaccaccgtcatacccggtaaagttaagccttgttcaggtccgacaacatgcacaattccttggcgaatatcattaataccgaattcaacaatattaaatgccttacagttatcatctaaggtctgaacctgaatacgagatgtatcatcttcaataccagcgatgccctgatcacgttcttttttagatgttggaacgttatggtctggggtagctacgtttgcacttaaacgccacggttgacgaccagcaagttgcaaaccttcaaatgcttgtggactcgttacttcatgcaataaatgacggtcgatataaagtaagcacgaaccatcatcacgctgagtaactacgtggtcatcccacaatttgtcatataaagttttgcctgccatgtcgtcttgctccattggactgggtaattctaatctttcttcgattatagccagagttttacataaatctaatttatcatttttataaattagaaaacttttaggaataattcctgaatgttttaatatcagtcaaaatatataaatcggatttgctaatgattatcatttgcataatccatttttaatcctatactctcatctctatactaaaaatatcaaatacaggtagagagaatggttatggctaatattcaaaaattcgttgttaataatcaacgtacattaaagaaaaccttaagttactacataatgcatattacggtagccatgttagttgcctactttgtaacgggtaatatttggatggctttaacattaagtatgttagaaccaacagtacaagcttttgcatttttctttcatgaaaaagtatgggcagcaaaagaccgccgtatatcagctttaagcgaaaacgagacgactgcttagattaagattaatacgctaaatcacaactttatagaacgttgagctgcaagcatgatacgattttggcttggcaactttagcctctctcgatttttctattccaagtagagttgtattatgaatcttgcagcctttgaagcttttgtaaaagttatggaaacaggttcgatctctgtggctgcagatcaactatttattactcaacctgctgtcaccaaacgtattcatagcctagaagagtactttggcgtaaagctatttgagtcggcaggccgtggggttcaagcaactcatgctgcgcattcattattaccaaaagttaaaagctggttaaatgaacttcgagatattcaccacacgctaagtcatgagcaaacccaaatacaaggacgtttaaaaatcgggacgagtcatcacatcggtttgcatcacttgcctgctccgcttaaacactttgttcagcagtttcctcaagtcacgctagacgtacattttgttgattccgaacaagcacacgaacaggtacttgctggcgatttagagttagcttttttaacactcccgccctcaggtgatgagcgtcttaactatattacgatctggaatgatcctttagtttttgtagctgctccatttcatccattggctcaaaaaaagaatttgaccttacaagatttaattgaatatccaagtttgctgcctgccgcacagacttatacagcccaaatcaccttggctgagtttgaaaaacaaggccttaaaccgaaaattaccatgagcaataacccactagagtcaattcgtatgttggtctctattggtttaggttggtcagttttaccaaaaactctgctgaatcaagatatgcagcagcttgatttaaatgtcgagatgaaccggcagttaggcatggtatggcatcctgcacgtactcaatctagagccatgcaggaattgattaaaatgatgcaagaataacggtattaatggctatattttttaacaaggatataaatcaaagccgcgaaaggtagtagtaaaaatagaacgccccaactgaaacatatagcagcgaaaataattccgccaagtgcactcataaacagtaaagcaatgatataaataagtaactcaccaaaaatagcggtaatgagctgatctataaattcttgaaagaaaccattgctacctttacttttagtgcgcttatttttagtcatgctattttaattaataaagttatatattgattagaaataatactataaatatataccctctactctactatcattatacttttcacttaagattcatgatcgtgaagaatcaatattcaaagataattaaaatcggtttatatctatttataactttagctatcttagttctagttacatttatttggtttaaacggatacgtgttattttcgcccatcacctttcattgttacattgtgatggtcaagtctgtgtagatgatccaaagacacagcctcttgcaaagacactttataatcaggcattaaaagagacccaaaataaagtaggtgcttttcatcaacaacccactatggttttttgctcaactccacaatgtgcaaatacctttggtatggaaaaagcagccgctaaagcgattggtaatttggggttattggttgcaccgcgaggctggaaagatttctatatcactcatgagcttattcatcatcgacaagcagaagaatggggaaatatagcaatgctaactaaacctaaatggctggtagaaggcatggcttatagcttaagtgatgacccacgacctactttatcggttccttttcaacaatggcgagctcaattcaagctttggcatcaacaaaatcctgattcaaatatttggcttaccacagaaaaaattaaataatttattagagagcttccggaatattacatttttctaggaagctcttgctttaaattaaatcgaccagtcctgaatttcccagttgtgttcttgagccagtttctcaagacgatcatcagggttgactgcaatcgcatgcgttgcatattcaagtaaaaaacggtcattaattgaatctgaataagcccaagactcagaaacgctacgaccgtccagccatgcctcaagacgtgcaagtttgcccttttgataacacgctaaacccgccactttacctgtatatttaccatcagcaacctcggcgttagttgctaagatttcagtaattccaaattcacggaaaatcggcgcagtaataaaatcacttgttgctgtaatacctacaatggtatggcctaaatcttgatgttttttgattgcatcaaaaccttttggtcgcatttgaggacgaatcactttttccataaacaactgatgaagctcagttaagtagttattatcatgctttgttaaaaagccgaaaacaaactcattataagcatatggatctagttgccctgctttgtagtcttcataaaatttatcattcatctgacgatgatgaaccggatcaaccaaaccttcattgactaaaaattcaccccacgagtggtctgaatcggtatttaacaaggtatggtctaaatcaaacaacgccagtttcatgaaaattctcgtttaaactgaaatttaagaaaaaaaatgtaaatctatctccgctagtcgatagaaattcgttaagatcgtaacaatttaaacattttactttgatcttttcgagctggacataaaaaagtgtttgtccccgtgatcgaagtcaacgatatagacaatatttaggtagccaaatgatcgactcagaaggtttccgacccaatgtcgggatcattttggcaaacgatgatggacaggttttatgggcaaagcgcattggtcacaatgcttggcaatttccacaaggaggcatccagtttggagaaacccctgaacaggcactttttcgagaactgagagaagaaatcggcttattgcccgagcatgtccagattattgcgcaaaccaaaggatggctgcgttatcgtttgccacatcggtatattcggtcagactctgaccccgtatgtatcggacagaaacagaaatggtttttactgaagttaactgcgcctgcaaaaaacattcagttaaacctcgccgacccgcctgaattcgatgaatggcagtgggttagctattggtatcctcttggtcaagtggtgaacttcaaacgtgatgtttaccgtaaagccatggtggagttgtgtacacagttgccagtgcaacaattaccctaaaaatcatttatctagcaaatgatttttattaaaagtgctgttataaatacattcatagtctaaaaaaatactggagtatacatccatgtcaaacatgcaactcgacactctaagacgcattgtccaagagattaatgcgtccgtgagtttgcatgaatcgttagacattatggtcaatcaggttgctgaggccatgaaagtggatgtttgctctatttatttactcgatgaacgcaatcaacgttatgtattgatggcctcaaaaggcttaaatccagaatctgttgggcatgtttcattgcagttaggtgaaggcttggtgggtctggttgggcaacgtgaagaaattgttaaccttgacaatgcgccaaagcacgaacgctttttgtatttacctgaaacgggcgaagaaatttataactcattccttggcgtacccgtcatgtatcgccgtaaggttatgggtgttttagttgtccaaaatcgacttcctcaagattttagtgaagcggccgaatcatttttagtcaccttatgtgcacagctctcaggtgttattgcacatgcgcatgcggttggaaatattgatgtatttcgcaagccaagcaatgggcctgcctataagacctttcaaggcgtttccggtgcaggtggggtggctttaggtcgcgctattattttatatccgcctgccgacttaggttcagtacctgaccgcgaagcagaagatatcagcgatgaactccgcattttagatcaagctatttcatcggtacgttcagagattcgttctttagatgaaaaaatgcatgactcgctcatggcagaagaacgggctttgtttagcgtattcttaagaatgctagatgaaaatgccttacctgcagaaattaaagaactgatccgtgatgggcattgggcacaaggtgcggtgcgccgtgtaattgaaaaacacactgccctatttgcacaaatggaggacgattatcttcgtgaacgcgtttctgaccttaaagacttagggcgacgtattctagcgtacttacaagaagaagattcgagccaccgtgaacttagcccagacagtattttaattggtgaagaaattagtaccgctgcgctagtagaattaccagtagataatatcgcagcgattgtgacgtcagaaggcgcagccaattcgcatatggtgattgttgcccgtgcattagggattccaacggtggtcggcgtaaccgaactgcctgtaaatacgcttgatgatgcagaaatgattgtggatgcctatcagggccgtgtttttgtaaaccctccacgtcgtttacgtcaacgttataaagaaattcaaaaagaagacgagcaaatcgcaaaagatctcaaacaatatgagaccaaagaagcgattacaccagacggtgtctctgttcaactgtttgtgaacacgggtcttatgattgatgtagtccgcggtgtacaacgtggcgctcaaggtgtgggtttgtaccgtagtgaaattccattcatgttacgggaacgtttcccgggtgaagaagaacaacgtgccatctatcgccaacaattgagtcactttgccaataagccggtagtcatgcgtaccctcgatattggtgccgataaagacttaccttacttcagtattgaagaagagaactcggcattagggtggcgcggtattcgtttcacgcttgaccatccggagattttctcagcacaaatccgggcaatgcttaaagccagtattggtttaaataatttgcatatcctattgccaatggtaacgacagtaagtgaagtcgaagaagtactttatttacttgagcgtgactggattgcagtacaagaagaagaacaagttaaaattaccaaaccaaaaatcgggattatggttgaggtaccgagtgtactactacaaattgatgaattcgccgaacttgtcgatttcttctcggttggttcaaatgacttaactcaatacttacttgctgtggaccgtaataatccgcatgtcgcaaacgtctattcacacttccatccgtctattttgcgggctttaactcgactcgtgaaggaatgccataaataccaaaaaccagtaagtatttgtggtgagatggcgggtgatccgttatcggcaatcttactgatggccatgggcttcaataccctttcgatgagttcaagtaacatcttgcgtgtccgaaaagcaatttgccatgtcccaatgtcagatgcccaaaagctgcttgatgatgtcatgaaaatgaataatccgcttattgtaaaaagctggcttgagtactactttaaaactcacggtctagccgatatggttaaatctaaccgccttgtaagcgtataaatacttaaaaaggagagtcaaaagctctcctttttcaattcatctatttttaaattttctctttatttttaagctgccacttagcgcacccctaatctttatttttccaaaaatcggttttaccaattaatatggacaatttaatccatttgaaaaataaacgatcagattctagtatatttaaagaacgaaattgaaagatattgcgatgtttcaatgattaaggagctcatgccatgcgtcattatttgcaaaatttgaaccattttccctcttgttttttagccttcatgcagtaaattgaaggaataataaacaaaggaaactcatgtattgttgaataaaactgatgagctgacataacagtgaaaaatttttaaaacggtttctctcaccatttgttctctcatttctttattcgatacgcatcatttttttaacccagaagtccaggaaaatgagccttcagttttattaagagctcaataaatattacccagagagaatataatcatgtcaaacgaatcaaaatgtcctttttcaggtcataactcaaaaccgcaagtaacagtcggtggtggcacggctaatttacactggtggccaaatcaattacgtgttgacttactcaatcaacattcagaacgctctaatccactcggtaaagattttaattaccgtcaagaatttaaaaaactcgactactacgcacttaaagccgacatcaaaaatgtattaaccgattcccaagactggtggccagccgactggggaaattatacgggcttatttatccgtttagcgtggcatgctgccggtacatatcgtatgggcgatggccgtggtggtgccggtcgtggtcaacaacgttttgctccattaaatagttggcctgacaatgcaagtttagataaagcacgccgtttactatggccagttaaacaaaaatacggtcaaaaaatatcttgggccgatttatttattcttgccgggaacatcgcacttgagtcttctggtttccgtacctttggttttggtgccggtcgtgaagatgtttgggaaccagacaacgatgtaaactggggcgatgaaaaagaatggttagctcatcgtaactctgaagcattggcgggcagtaatcttgctgcaaccgaaatgggcctaatttatgtgaaccctgaaggaccacaagcgagtggtgacccacgctcagcagcaccgtttattcgtgccactttcggcaacatggcaatggatgatgaagaaattgttgccttgattgctggcggtcatactttaggtaaaactcacggcgctgcctctgctgaccatgtccaagcagacccagaaggtgcaccaattgaacaaatgggctttggttgggcaaacagctatggcacaggtgtcggtaaagatgcgatcacttcaggtttagaagttatttggtcacaaacgccaacacaatggagcaattacttctttgaaaacctcttcaaatacgaatgggtacaagaacgttcacctgctggcgcaattcaatgggtagcagcagatgctgaagccattattccagatcctttcgacccatcaattaaacgtaagccaacgatgcttactacagatttgaccctacgttttgaccctgagtttgaaaagatctctcgtcgtttccttaacgatccacaagcctttgccaatgcttttgctcgtgcttggtttaaattaactcaccgtgatatgggaccaaaagcacgttatttaggaccagaagttcctgccgaagatttaatttggcaagatccattacctgctgctagcgctacaccatcttctgcaagcattgctgatgcaaaagcaaaaatcgttgctctagggttatctactggtgagttggtttcccttgcatgggcatctgcatcaacattccgtggtggagataaacgtggtggtgcaaacggtgcacgtattgctttatcaccacaacgtgagtgggaagtaaacaaaaaagctgttgagactttaactaaaattgaagaactcaaggcatcaacccaattgtcattggcggatttaatcgtgttagctggtaatgttggtgtagagcaagctgctcaagcagcaggtttcaatattaccgttccgtttgcccctggtcgtgttgacgcattacaaagtcaaaccgatgttgaatcattccaattactgctcggtcttgctgacggtttcagaaattggaaaaaacagggagtcaacacaccagctgaagtcttattaattgataaagcacaacaactgactttgactgcaccagagttaactgcattgattggtggtttacgtgtactaggcactaactgggatggttctcaacatggtgtcttcactcagcaagttggggtgctcagcacagacttcttcacaaacttactcgacatgtcgaatgtatgggcacctgttgattcaacaagtgaagtatttgaaggaaaagaccgtaaatcaggcacagtgaaatttaccgcaacacgtaatgatttagtctttggttcgaattctatcttacgtgcattagccgaagtttatgctcaggcagatggtaaagaaaaatttgttcaagactttgttgctgcatggactaaagtcatgaatcttgaccgttttgacttagcttaatttaagccaaaataataaaaagccagttcaaatgaactggcttttttaatacaaaacaatgaatttttagacagtcaatttatgcccttctcgaatgcaataaaaaggattagcaagctttgatgaagctttaatggcttgagctaacgcatgttcaggatcttcacgcccctcatccgttaactgaaaagttcgatagtgaattgccaccgaccgatgtgcttgtaaatctaaatgcgcatgaactgcatcttgcggattcatatgaacatagctcattaatttacgaggttcataagctccgattggaagtaaggccacacgcggcgcaccatagcgcgtatgaatttgtttgaagtggccggcataaccggtatcacccgcaaaaaaacaatgtcctgttttcgccaaaaccgaaaaaccgccccaaagtgccttattttggtcacgtaaaccccgccccgagccatgctgagcaggtgtataaacaattcttaattcgtgataaggaatttcctgccaccaatccatttcaattacatggaactctttaggcaagtaaaatccgttgccaagccctgtataaatcggcatagcaaacttcttatgcagccactcaagcgttgctaaatccatatggtcataatggttatggctcaacaataccccatgaatggtaggtaactgttctaaagcaaaacccgctgggcatacacggcgtggaccacggccatgtaaaggacttgcgtagtcacaccataccggatcggtaataaagttataaggtccaatttgaatgagtaccgtagcatgccctacaaaccaaacttgccaatcatctaaatccgcatgaggacggttttgtggtaaagcaattggtgtattaacacgtacatcatattcattctgaatatcaacattccaagtataagactcacgagtgactaaccaacgcaataactctttcgatcctcgtgcaggcgatctaggctgctgattataaaaacgggtatcattttcatggcccagttcaggatgacaaaaaggtggttttatccatgtatgcgtccaacaggactgagtcggcaattgataagttaatgtcggcttgtctttcatgggcttattctatggttgtagcatcaggaggatgaatcattcagttttctatcttagcgatttaaataaattaagctatgacacttacacttatttatcatataaatatcccttttatttttgtcacagccgacatagatcaatctaaagtgccacaaaaaaatgtttagatgtgttgagtttgtgattcgttaattactattcttattaaaagctactgtataacataacaatagaatataataagcaaagacttacaacagaggtgagctagtttctttgtggttaatctcttatttttaaaactgctcaattttatcaattttgcttcatatataaactattaaaccaagcagcacatgcattgaaaaaattaaaaaaatatagcaagatgaaccgaaacatttattaacaaaatactccttacacattttttgttagaaattaagattctcaattgttaaattaacaatactttttttcataatatgagaaaactttaagtgaatttctggaaagtaatttaaatttcttttctaaatttaaaatcactttgttatgaatatgaattaatatattttacaaattaataattaaataaaatttcatattaatttcataatgatttataaattttcatttattttataaatacctaaagcaccttcacgctatatagttttatgctttatactttgcttaaatcatagtaagacattttttggattagtcttatggaattacgccatcttcgatatttcattacagttgctgaagaattaaattttagtaaggccgctctcaaactctatactgctcaaccctcccttagccaacaaattaaagatttagaagaagatgtcggggtacgacttttaaaccgcacaaaacgtaaagttgagttaacagaagaaggtgaagtatttttagagcatgcccgtttaacgcttgctcaagctgataaagcagtagcgatggcccgccaagtctcaaaggctaaacaacaattattacgtatcggtttcgtccccatagcagaaatgaaaatttttccatacgtacttccaaatctgcgcttacaacaccctgacctcaccattgaattatcaagtttaaataacgctgagcaactcaaagccttaaaaagaggtgaactcgacatcacgtttacccgtgataatactgaaaatgatgaaatccaaagccaatttgtcttaacagaacctttaatttttttattaccaagaaaccatccacttgcgaaatatgaccgtattccggtcaaagctttgcatggtattgattttattattccggcagctgaacaatctaatacactacacaatacaattttagagtttactaaaactcatggtattgacctcaatattgtacaaaaggccgatagtattttacttaatataaactctattggttcaggcttaggttgtactattttacctgcctatgtcgcgcctttaggggtctctaacactgtagttcgccctctagatgtcgaattaccttctttagatttatttgttagttatcgtaaaaatacagagtcagtcggtgtaaaaagatttattgatcaactcaacaaagtatttcatcttgataaaaatctagattaaacactttaggtatattgacgcttattattaaagaataaatgagttagaaaatttaaatgtatgtataaataaatgaaattaaaatttatttaatatcttttatcgattaattaatttgagataatttttattatattttagattgtcacacttaataaaaacaaaaatgacgatctaaattataaaggttatataaaacctaatgttaaattaaccaaacagtaaaaaatatatttaagataacagcaaggagagttaacaagatggttggactatttcagcatttaggacgtagtgtacaaaaccgccctcacttctttattgctttaatttttggagtagttgttgcaagtttattggcatggctcacttcatggaaatggtctaccattttattagcaagctggaatggctcgatcagtttatatttactccatgtctggaaactgatgagaagtgccgaccattcacaaatgcaacagcaagccaaaaaacaggacgaaagtaaatgggtcattatgctcattgttttattggccatcacaatgagtctggttgcaattttggtacaactttcccagctcccttctgggcattatgaaaagttaggacatgtagcgttagctttactcaccattatttcagcatggcttttcatgcataccgttttcgctttgcattatgcccatgacttttatatggctctatccagaaatgaagagaatggtggattagacttcccgggtaccgaacatccgacctaccctgacttcttatattttagctatattattggcacctcagcacaaaccgccgatgtttcaattaccaacaaacatatgcgtcttttaaacttatttcatgctgtattatcttttggcttcaacacgaccattttagcgatttgtattaacgttgctgctggctttcttaccaactaagacctttatttaaaaacaaaaaagccccatttagagggcttttaagaataactatacttacaacagttggcccatactgctttgttttaagccttcgcgctgtttgatcgtttcaacataacgtgcaatagctgggtgcgattcaatcgttttcatttttaattgccataatagcatggctccaacacttatatctgcagcggtaaattgttcaccacatacatacggatttgcttcactcagtccttgaactaaagcttgataagcatcgttataatcaccataacccacaaacattttttgctcaggtgagatctctattcctaaagctttatcgacaccagcagcttcccaaggacctgccatcataaagagccaacgatagtacaaaccacgtttcggatcatctaaagcaggtgccaaacctttgtcactaaatttgtctgccagatatgcacaaattgcacctaattcataaataacgacatcgccatctaccaatacaggcactttcccaaatgggttaagctttaaatattcgggtgatttcatctcggttcggtatgctacttcaatacgttcacattccacgccaagctcaaccaaaagccagtctataacgacaccacgcgattcattgttagtataaagtttaagactcattcttattgctccttgtttatcgtgattcctagtctacaaataccttttgtcagtttttgtcagtagtcctttgcatttcttgtttccaccatctttgaaacagatgttttttaaattcaggatatatttcctcactcatttgcaagtcatgaatacgatctatccgaaaatggcgaaaggcctgccgtaattcacaccaagcagcaagtacaactttgtcatgtaaataccctaaagcaaaaggccaaagagaacgttgacttatacgcttgtgttcatcgcaataatcgactttgatctttacttgtttacgaatcgctaaacgtacttgttctactaaagcttcatcaaccggatgccagtaatgtgtaacacctagcgtcatatcatcgatcaaatatttccggtgctctggtaaaaccgcataaagtttagaatagattgaaacagctgccgatttcattgcctgatctggaacgtctttcaaccactctaaagctaaaaatagagcctcggcttcattctcattaaaagtaaccggtggtaataaaatgtcttctttaagctgaaaccccaaacctgccgatgcatctattctgacaccttgagcacgtaaactatcaatatcacggtaaatgctgcgaatactaattcccaagcgttcagccaagacttgagcagtaacgggataacgagattcacggagttgctgtaaaagatttaatagacgaatagagcggctcattttttctcttcttattgttctttagttttaaaaataaggaggaataaattcctccttcttacatcattttaaattacgctacgtctacagtagataactttgcatactctcttaaaaagttgtgcagctcaggtacatctttagcaatggttaaaggttggaactgttgtagaacttcgaccgagtgcactccatagcccaccccaatacgaggcatacctaaacgctgagccatttcaaggtcataactactatcaccaatcataactgcctgttcgacacttactccagttacagtcaagatttcttgtaacatgagcgggtctggttttgaacgggtttcattggctgctcgagtaacatcaaacagatgagtactctgtgtttttgcaatcacacggtctaatccacgacggtttttacccgtcgcaactgcaagttttaaaccttgagcttttaagtcatgaagtagttcagaaataccttcaaaccatgcatcatttgtcgagttggcaatatagtgatcgccatatgcttttaaaatcgaatcatgcaaatcaggtacttctggaaataaggtctgcatcacttccggcaaacctaaaccgataatactctttgcggcttcatcagtcagagttaacttatgctcttctgccgcatgctgtaaacttgcaacaatctgaccaacagaattatataaagtaccatcccagtcaaaaatcactaattcggttttcagactcattttgctactctcaaagcctctaataactgggtcatgtcttctggcaacggtgcttcaatcgttgggtaacccggaatatccaaacgcatggcatgtaaacacaaacggcgtgcttcaggccccgtatatgcagtgttgtgcccatatttatcatcgcccaccaacggatgtccaatacttaaaccatgtacacgaatttgatgggtacgccctgataaaggagatgcatgaactaaagtggcatttttaaagcgctctgcaactacccattcggttttacttggcttaccttctttagatacacgtacacgacgttcgccattggctaactcataacgaaataaaggcgcatcaatgagctgtttatcaagactcacctgaccttttacaatcgctgcataggtcttacgaattttgtgttcacgcaacatatcttgtagcagttttaaagtgctacgcttcttactaatcataactaggccagaagtatcgcggtcaatacggtgaatcagttctaaatattttttacctgttgccgcacgtagtgcctcaatcaaaccataagccacgccactaccaccatgtacagcaatacctgatggtttatttacaactaatagaccttcatcttcatagaccacacgacttaataaaccttgagccacactgtcgcttacaggaacagcagtttcatctttttgttcatagcgaataggtgcaacacgaatctggtccccaattgcaagtttggtctcggctttaatacgttttttattcacgcgaacctgaccttcacgaatcaaacgataaattcgactctttggcacaccctttaaacgtgaaaacaggaaattatcgattcgttgtcctgcttgatgctcatccacctcaaaccaagtgacactttgccattgctgtgtagaattcatactaatatttaaacctgaaattttacgaaatttgattaataaatgaccgattagcttagttttttcacaagaaatctaagcttagcccataggcagatgctgcaaggtttgatatagtcagcgcacggataccaccgtaagtgaacatctaaagggaaatttccctgattgaaacctcaatcaaaatgatgctttcatcaccagctcggacaggtcctaaagaattatgccgacgccgaaggcttattatatcggcaaaatgacaaactgttgcgtttaattcagtttgttcaaaaaaatatgttaccaactctagttggttatggaacgtaaactgatacacatcagacaaatcgctccttaatgttgccttcaggctaaagcgttgatgcattggaactgccgaaagcaccgatacgatgagcattccgtatcaaacttccaataaagaagtcacttcgcgcccaatgacagtgaaagtcattaaccaatgcaccgctcacccgccagtgaagcaaaaaggaattccgatttaaaggttgaagcagtattgcctacatcacagacgagaatcgaagctaaggctaaatgtagccggtaacagatgactcagaccacaagtattttgagatctgggaaatgatccgtcatgttcgatgttcgttcagaacctttaagtttgtttggtttgtttgtgtgagtcactattaggtgtcacacccatgaaacgtatgttgattaatgcaactcatgccgaagaagttcgcgttgcacttatcactggtaatcgtctttacgattttgatttagagaatcgtacccgagaacagaaaaaatccaatatctataaaggccatgtcacccgcgtagaaccatctttagaagctgtttttgttgaatatggcgcaggtcgtcaaggcttcttgtctatgcgtgaaattgcgaatagctattttcaggcagacccacgtcaaacttcaaacattcgtgaacttattactgaaggcacagagcttttagttcaggttgaaaaagaagaacgtggtaataaaggtgcagcactttctacgtttatttcccttgcaggccgttatttagttcttatgccaaataacccgaaaggtggtggtattagccgtcaaatttcaggttcagtacgtgaagaattaaaagaaattttagcttctttaaatgtacctcgtggtatgagcgttattgttcgtactgccggtattggccgtactcaagaagaattacagctcgatttacaacacttgcttgacctttgggcacaaatccaaggtacagcgagctcaggcccttctccgatgcttgttcatcaagaagcgggggtagtaacacgtgcaattcgtgattacttacgtgatgacgttgctgaaatcttaattgatagcgaacaagcttataacgaagcatataactttgttaaagcagtgatgcctcgtcaattagacaaattaaaaacttatactttaaacgagccattgtttgctcattttggtattgaaagccaaattcaaactgcttacgagcgtgaagtaaaacttccttctggcggttcaattgtgattgaccagaccgaagctttagtttcaatcgatattaactctgcgaaatcaactcgcggtcatgatgttgaagaaactgcactgaacaccaaccttgaagcagcagaagaaattgctcgccagcttcgtttacgtgacattggcggtttagtagttatcgactttatcgatatgactaaagaacgcaatcaacgtatggttgaagcaaaacttcgtgaagcaacacaaagcgatcgtgcccgtatccagttcggtcaattgtctcgttttggcttaatggaaatgagccgtcaacgcttacgcccatcgcttgaagaagcaacaggttatgtatgccctcgctgtcatggtacaggcatggttcgtgacttacgttcgctttctctttcaattatgcgtaaagttgaagagattgcacttcgtgaacgtcatggtgaagttcaggttgaagttccagttgaaatcgcagccttcttgcttaatgaaaaacgccatagtctagtgtatttagagcaaacttctggtgtacgtgtgactgtattgccacacccgcacttagaaactccacattacgaaattgcatataacccagatggctttgctccatctagctatgaacgtacagaagcaacccgttctagcgagaaagagttaggttatgagtcttctgaatggcatttagaagaagcagatcatggccatgctcatgtaactgctacagcttcaactcatgctgcggctcagaaaaaagcaaatcatgcaactcaacctgtagcacaaccttctgctcaaaaagcagcaagcccttgtgcatggttagaaaacctgtttgttcaaaaacaagcgcaaacagttgaccaatctcgttcagcacaaaatgctgctgctgcgattgagcaaatggtgaatacaggcgcagtaagccgcggacagttcggtcaagtagccgtacctgctgttgcagaagttgcgccagttcaatcaaataatgcttatatttcacagtcacctgtgaaacaagacgttcgtgaacatgttgaaaaagatgataaatctcagcaacaacgtcagaacaacaaaaagcgtaaacataaagagcaacgtgaacaacatcaccaatcacatgaacagcaacatcaagttcatgaagaagtggttcaattgtcacgccaagaacaacgtgagttaaaacgtcagcaaaaacgtcaacagcagcaagatcagcaacatcaaaataatgatgtacaacacactgaaaatgctgtgccacgccgtgaccgtaataatcaacaacgtccaaaccgtccaaatcgccaccgcgatccaagtgtattaaatgaaaatcaaaatacaccggttgttattgatgaaaaacaaattaaggttgatgtgattgatgcacctaagcatgatgtcatgaacactgctttaatcatcaatgttgatcaaggtcaaagtgagattgttgcacttacgcctgagcatcgtcacgttgagcgagttgaaacgacttctactgaagttgctcaagagccaactccagctcctgttgtagccgagaaagctgctgtagttgaaaccaaagaagaagctcagccaagccaagaagctgctcagccacaaatcaaacgtgctagcaatgaccctcgtatgcgtcgtcgtcagcaacgtgaggctaaacacgctaaggcagctacgccatctattgcgccatcgcaaattccaactttggcacaacacacaatcggtagtttaatccgtcatgtgtatggtgaagattgcaccgtattgattgaacaatttggtctagtcccaacgtttaatcgtgctttgcagaaatttgcagaacagtacgcaagtacgttagtagttgaagttactgctgaaacggaagagaaaaagccggtaactcgtgatgcagaacttccaagccacaaaccggctgaagaagcagaacctgcaccagtacttccgcttactccgccgcaagcaccagctccacgtgttgcaaatgacccgcgtgagcgtcgtcgtttagcaaaacttgctgcggaacaagcatttgagcaagtgaaacaacaacattctgctcaagaagaagttgctactcctgctcctgtagcagaagaaaccgttgctgctccaactgctgaaacacaagcaacagttgaaccagcacaacaaccgcttgaacttaatcagtcaactgaagtggtacaacctgaagctgctcctgcagaggaaaaagctacagaagaaacagtagctgaagctcctgcagcgaaggaacctgcgccatcaaaagcagcaagcaaagcaaaagcagcggctgaagaaacagtagctccgactgaagcaacaactgatgccgaatcagaagacgttaaggcagataaggacaaaccgagccgccctcgtcgccctcgtggccgtccgccaaaaaaagctaatcctgtagctgagtaagccatttgctcaattgcagctaatttaaacaaacctagtcatttcgatgactaggttttttttgttatttttagccaattaggttgattgcactagaagaaaagttttaaaagcatggtgaaccatgaaaactattggactttttgcccacacaaccttttttggattgatcgaaaaataaataggattgatatgagccagacaacacagaccgatatcattacgcttggtgatgttgccacaagacttcctagcttcattcccaaagtaccccatatcctaaatggtcttaaacaggcttatttaagaacatcaaatactccaacaggtttgggtattgcttttgaaaaagctgttaaaagaaatccgaaaggcacggcattattatttgaagatcaaagttattcttatgaagctttaaatgaatgggcaaaccagatttcccattattatctttctctcggagcgcgtaaaggggacgtcattgctgtaatgattgaaaaccgctctgagctgattgcaacaattgttggtttagccaaaattggtgtgacaattgcacttgtaaatacatctcaagtcggtaaggttctcgctcatagcatcaatcttgtaaaacctattgccgttattgctggtgaagaagtccgagctgctattgatgaaattcgtcaggacttaaatgtacctaaagaccgcttccactggttcgcagatcaggcaacacgtcaaaactcgggtacagcgcctgaaggctatgtcaatcttgcggaccaaattgatcaatttccaaaattcaatccgtctactacccgctctgtcactggtaacgatggtctgttctatatctacacatcaggtacaacaggtttaccaaaggcggttattttcaagcacagtcgctggacattagcgtatggcacctatggtcatatcttaaacttaggaccagatgacgtcatgtacgtgaccttaccgctttaccatgcaacaggcgtggtggtttgctggtgtggcgttatcgcaggcagtgcaacacttgcgattcgacgtaaatattcgactagcgcattctggaaagatgttcaaaaatttaatgcgtctgccattggttatgttggtgaactttgccgctacttgatggatgctcctgtcaccgagcttgaccgcaaccatcgtgtaaccaaaatgattggtaatggtatgcgcccaaatatctgggacaagttcaaacaacgctttggtgttaaagaagtacttgagctttatgcatcgagtgaaggcaatgttggatttagtaatattttcaactttgacaatacggttggcttctctcctactccatatgccattatccaattcgataaagagaaaaacgagccagtacgcgataaaaatggctggtgccagaaagtaaaagcaggtgaagttggcctactcatcgggaaaattaccagccgctcgccatttgatggttacactgaccctgaaaagaacaagtctgtgatctggaaagatgttttcaagaaaggtgattcttatttcaacacaggtgatttggtccgtgacatcggcttccgtcatgcccagtttgttgaccgtctaggtgatactttccgatggaaaggtgaaaatgtatcaacgactgaagttgaaaatatggtgtgcgaatacgacaaaattgccgaagctgtcgtttatggggtagaaattccaaataccaatggccgtgccggtatggcagcgatcactctcgcagatggtgaagagctaaatgatgctgatttaaccgaaatggtgaccgtatttaagaaatgtttacctacctatgcagtacctgtatttttacgtgtacaaaaaaaggtcgaaacaacaggtacatttaaatatcagaagaataaactgaaggaagaagcgtttaatccaagcaaaacttctgaacgtttactcgctttattacctggtgcaagcagttattgtgatatcacaactgaaatttttgacaatattcaggcgtataaataccgtttttagtttattttttagctaaacaagaggaaatcgtgctttttataagcaatcatgcaaatgtttttaaatttcctcttgtgttagttgaataacttgctaaaatacgcgacatcaaaacgatacagtgtttagaagtgttacttctctctgagtcagttcgagtttgattgctaaagaaaattatagattttctcctgcattcaagtaaaacaaggttttacttaattctcgctcagggtcgttagctcagttggtagagcagcggacttttaatccgttggtcccgcgttcgagtcgcggacgacccaccacttattagttttgaacctatttgggtcgttagctcagttggtagagcagcggacttttaatccgttggtcccgcgttcgagtcgcggacgacccaccaaattctaaaaagcctctcagttcgagaggctttttttattgttatcctattttctttttatgactaaaagatgacgatacatttgcgatttaaaacttcccccacccaattcataaaaacttctagtcgctttggaatataactcctgttgggatacaaaatattaagtggaagcgatggtgcactgtaagcactcagcacctcaactaaaatcccctgttcaattttatcctgaacatcataataaggaagttgaataattcccaaacctgcacaagcagcggcgatataggcctcggtattgttcacacttaaagcactatccatcatcacaattccaccttgatatataaattctccctgcttttctcctacagctcctgcgtaattaattaatttatgctgttcaagatcatttaactgctcaggaacaccataatcttgtaaatattgcggactggcacaattcaccatcactaaatgaccaataaatcttgcaattaaactgctgttatctagctctcctacccgaacaacacagtcaattcccttttcaattaagtcagtcaggtcatcagaactattgagctgtaaatgaatatccggataacgatgataaaaatcaggcagctcaggaataatcacttgatgcacaatccggctaggcatcgaaatctttaatgtgcccctataatgctgtttttgtgtctggatcaactgttctaattgttcataatcaaacaacaggttttggcattctggcaatattcgttggccatcttgagtaagactgactttacgggtagtacgatgaaataagcgtactccatagtgagtttctaactgttgaatggcactcgttactgtcgagcgaggtaaatcaagctgatttgctacctcactaaagctttgtcgtttagcgacttctgtaaaaatataaaattgctgcaaccgatccattttaattgttcgtattttctgaatagttaaaccaaactagcataattgatcacaaattagtgccaatctagacttaaaaacactaaaacaagtcatcataggaacaatcatcatgacaactcatagcctcaaagataaagttgtattgattactggcggtgctaaaaacctaggcggactcattagtcgtaaatttgcagaacagggtgcaaaactcgcaattcattataatagttcggaaactcaggcagatgcagagcagaccttagcagatgttaaagcattgggtgcagatgcaattctaattcaggcagatctaactcatattgaaaatattgaaaaactgtttatagatacgaaacaacattttggtggtatcgatattgcgattaataccgtcggaaaagtccttaaaaaaccgtttttagaaaccaccgaacaagagtttgatagcatgagtgatatcaactcaaaaattgcctatttctttattcaatcggcgggtcgacatttaaataacggcggaaaaatctgttccatcgtaacttctcttcttgcagcttacacagggttctattcaacctatgaaggtttaaaagcacctgttgagcattacacccgcgctgcatcgaaagaatttggagatcgccaaatttctgtgactgctgttgcaccgggaccaatggacacaccattcttttatggtcaagagtctgccgaagcagtcgcttaccataaatcagcttcagctttaggtgggcttactaaaattgaagatattgaacctctagttcgcttcttagtcaccgacggttggtggattacaggtcagacgattttcgcaaatggtggttataccacccgctaaaattacaaaagccgtatctcatcgtgcggcttttctttataatgcattgattataagaactcttcgagtaccgagtttaagaaaatatgcccctgctctgtacaagccaaacgatcgctatcctctaccaataactctctcgaacgcaatgaagtaagcagatcatttaaatcatctaaacttaagcctgtacgctgttcatataactcagcttttaccccatcatttaaacgtaaagcgttcatcataaactcaaaaggtagttcatctgcttcaatctttttcatttgcaaatgttcggctggaaccttagccaaatagtctttcggtaaacgagtcttttgaaaacgatatacaccatctggtcgggttactttgccatgtgctcctgcaccaatcgcaagataatcaccaaattgccaataatttaaattatgagctgaaggctgctctttacgccaagctgacacttcataattgataaagccatttgcttttagataggcttcaccttgctcttgaatatcttctaacacctcatcttgaggtaaaacaggttgtgttcggaaaaatacagtatttggttcaatggtcagttgataccagctgatatgtgttgcaccctgctctacagccgtctttaaatcataaagtgcttgctctagtgtttgttctggcaagccatgcatcaaatcgacattaactcgcttaaaacctgcttgtcgtgcctgctcaattgcatccatagcattgttggctgaatgaatacgcccaagcttttgcaggtgatcggtattaaaagtctgtacaccaatcgataaacgattaattcctgcttctaaatagcctgcaaacgggtcatgttctagtgttcccggattagcttctaaagtaatttcacagtcatcttcaaagttaagcagcgatttaagctgttcaaatagccatgcataacctttagcagaaataagtgaaggtgttccaccaccaataaatacactgtgaattgaacgtccttgtgccatctcgacttgagtttcaaagtcggctaccaatgcttttaaataagtttgctcgagttctgccgaaagcgcaccatcaggcaccgcatgtgagttaaagtcgcaatagggacatttacgcacgcaccaaggcatgtggatatataaagataaaggaacagaagcaggatttaatacggccaaggaacagggtccaatttacacaatatttctattttaacatgactgcatcaatgggcttatgaaaacataccttaattgctttagactgtttttaaacatacttaaatattgataaaaatgatgaaattctctagtcaacttttcctgatcttacccttagctatgggaatcggtgttgccatggcttttcagactgcaattaatgctcagcttcgtgagcaattacactcacctttgcaagcagcattgttatcatttttcataggtactatcgtcttagccattatggtgttcttccaaagtgccgagaaaccgagtttaagtgaaatatccaatattccatggcttctctggaccggaggatttcttggggtttatgcaattagcatgagcatttatactgcacctaagcttggttttttaacctttacagggttagtcgtttttgggcaattggtcatttctatgttacttgaccattttggctggttaggtaccgaaaagacacctgttacatggcaacggtttctaggtggagtggtcatctttgttggtgtattacttaccttgcaacgctagtttcattttttatatttataaagagtaccttttgtgtcgaatgtcacgtcgtttcggtctgaattaaaacaactcttccatttaatgttacctattttaattacgcagtttgctcaagcagggttcgggttaattgataccattatggctgggcatttatctgctgcagacttagccgcgattgcggtaggtgtaggcttatggattccagtcatgctcttgttcagtggtatcatgattgcaaccacaccattagtggctgaagcaaaaggcgctagaaatacagaacaaattccagtgattgtccgccaatcattatgggttgcagtaattctaggggtattggcaatgctcattttgcagcttatgccatttttcttacatgtgtttggcgtaccagaaagtttacaacctaaagccagtttattcttacatgcaattggtttgggtatgcccgctgtaaccatgtatgcagcgctccgaggctattccgaagcattaggccatccccgccctgtcacggtcattagcttactagccttagtggttttaatcccgcttaacatgatttttatgtatggcttaggaccaatacctgctttgggtagcgcaggctgtggttttgcaacatctattttacagtggctgatgctcattacgttagcaggctatatttataaggcttcggcttatcgaaacacatctatttttagcagattcgataaaattaacctgacttgggttaaaagaattttacagcttggcctgccaattggtttagctgtgttttttgaagtgagtatttttagtacaggggcattggtccttagccctctaggagaagtctttattgccgcacaccaagtagcgatttcagtcacttcggtattatttatgattccactttctcttgccattgctttaactattcgcgtggggacgtattatggtgaaaagaactgggcttccatgtaccaagtacaaaaaattggtctaagcacagcagtattttttgctctattgaccatgtcttttattgctctaggccgtgaacaaattgtctcggtttatactcaagatataaatgttgtgccggttgccatgtatttgctctggtttgcaatggcatatcaattaatggatgccctacaagttagcgctgccggctgtttaagaggtatgcaagatactcaggcaccgatgtggatcactttaatggcatattgggtaattgcttttccaatcggtctttatttagcgcgttataccgattggggcgtagctggtgtgtggttaggtttaattattggtttaagtattgcctgtgttttattgctctcacgactctatttgaataccaaacgtttaagtcaaacctaataaaaaagccgatgaaacatcggctttttttattttatgcagactttgcccgtgggcttgctccaatttgccagacaaaaggtaaatccgtacggtttacttcccaatctccaattactttttctttgtaaataagcggattatgtgaagccacagtccgagcattacgccagaaacggtcaagttgtttcacttggctactcgccgatgcccctaaggcattaaataactggcttgttaaatcgagtactagattagaaatcaccacctgcccttgtgccgactcaagctcggcatctacattgaattgatgctctttcacttcggattcggcaaaatgactttcataggctttttgcagtgcctcagcggtttttaacgtaattgcttcacttgcatacgcttgagctgaggctttgccgaccacttgtaaaacttgtgggtcgtgacgaaccaagtcaccattaccatgactaaaaatacgtttacgttcacgaatttcctgactaaacgtctcaaccgcggcacgcgcaatacccgttaaagttgcaagatgcaccacctgataaaaagcggtctgatatttaaaacgttggtcaaatggaataaggtgtgaagctggcaaatgaacctgatgtacttttaaagtaccactgcccgttgtcttttgaccaaaaccatcccagtcatcaatcacgctcacccctgtttcatggcggtaaatagcagcaatcacatgacggtcatttacttcatcgtaagcaaataaatcaatccagtctgcaaaaatacttcctgttgaatagtacttttcaccatttaccaccaagttacccgaagcgtctttggtgacacgtgtaacgacatcaccaatctgtacgtttccaacttctgtccacgcattcccgactaaatcaccttgtacaaagcgctgaaaccagacttcctgagaatgctctttatgagcaaccaagcggtcttcaacaaatgcaaaatgacctcgtaaagcttgcacaatattggaatcagcttctgctaactctgccaaaagctggaacagttgaggtaatgaaaccccatctccaccatatttacggggtattcgtacagcgcccaacttggcttcttttaaccactgaatcggctcaaaaggcaagattcgctctttttcccgttgaattgcaccttgtgcaattttttcgaaaatgggacggaatctgtttgcaaccttttcgtaatcagcaccgaccgacagttcttctaattcaatttgagctgttgtcatcgttattctcctaattttgttttttctttcaatttagctccatgcatgacgaggtggctgaaccccattgagataatagttaccaacaatgtgatatttccaacgcacagggtcatgcaaagtgtgggtacgggcattgcgccagtgacggtcaaggttgagttcagataaagtagaacgcgtacccgataactcaaaaagtttattggctgccaaaatagcaatttctgtggtgagtacttttgcctcggcaaccaatagagtggcttggtttacatgttcttcggtggtgttggcaatggcctgatcaattgcatctccagccaaatccaataccgcttctgctgcacgcagtttgatttttaggtcaccaatatttgcaatggtgtaagggtcatcactggctttttctagacctgaatcaatccatgcacggctatggtttttaacatattgaatcgtttcttcaattgcaccacgtgcaataccggcatcgaccgcagcctgaataaactgagaaatagcacctgctggtgttgggcgctcaaatgcttggtaaattggaactagatattcttcacgtactggcacctgattcagctctaccgtgccgctagctgtagtacgttgtccaaaaccagaccagtcattaataatattgaccccagatgtttcacgtggcacaagtgcagcataaggttgcccttgttcatttatagcaacaattggaatccaatgtgcgagcaaggcacccgttgcaaagaatttcttgccattaatttcataaccatgctcggtcttttgaagtttagtcgtgaggtccgcgactgtcttactgtgtttttcggaaaatgcattgccaaaacgaattcctcttaacaccaagttaaagaagaactgttgctgttcaggtttcgcatctagtcttaaatgttcaataaaagccaagtggttttgaggcaactgagcaagagaagggtcaacgctcgcaattgttttgatcacttccgctaaagttcggtacttgacttgcgccccaccaaattgcttaggtactgtaatggcccacaggccactttgtgagaactgttgaatttcatttaagggtaaacggcgctctctatctcgatctgatgcttcttgggcaaactcttgagcaagttgcttggcaatctctattgcctcttcatcagaacgaataatatgtgcgtcttttgactgctcgaatacagataaaggaaccgcttgagagcgcccataggacgaatttagactggtcataagttttattgtctctatttcttatttaacatgcccttcaccttagcactaaaaaaacagcgactttatagatattaaagctttgtttatgaaatgaatcttcaaaagcttttcatattttttactataaaaataacattttgtttttcgaaaattttcttacaggagataaacaatttcttataggctttttaagttttgtcacctatgatcaaacctaggcaatattatgttgtagtcaatgaggtatcgaagatatggcaaagaatgcaagttcacctggcaaacgatttatgaaacttgcaggaatgaccgcgagcattgcaacaaaaaccgtttctaactcgattcgaaacctgactgcggatgaagaacagaaactggctgcaaaaacaaaattatttcaagatatcggacttcaaattgcagacaccttgggagaaatgaaaggtgcggtcatgaaggtcgggcaaattgcatcgcaatataaagacatcttcccgcccgaagtcgccaaagcgatatcaaaactacaacgccaagctccagctatgccttttgcagcgattcagcaacaagttgaacgtgagcttggcaaaccgctgaatgttgcctttaaatcttttgaacaagaaccttttgctgctgcatcgattgggcaagttcacaaagctgttctgccaagtggcgaacaagttgtggttaaagttcaatatcccggtgttgatgaagcctgtgaaagtgacttaaaacaagtacgtttagcccttcgcttaatgggtgtacttaaaattgataaaaagttgcaagatcagctttttgcagagattcaagatagtctgtcagcagagcttaactatgaaattgaggctcaaaatcttgaggtctttaaaacttttcatagtaaattagacgacaaaattattatcccgactgtttataaagattactcttcaagacgaattttgactttaagccttgaacaaggtgacagcattgaaactgcgagttcttggcctatcgaaattcgaaacacaattggccgtcgtttaatccgcgctttgggtcaggaaatgttctttttaaaacgttttcactgtgaccctcacccaggtaactttgccttccgccaagatggtagtgtcattatttatgactatggcagtgttaaaacactttccaatgaaattgtgtatagtttcaaacgattagtgaatgcagctcgccatgaagatatcgacttaattgaaacagaattactcgaactacattcactagcagaaaaaggtaaattcccgagcgatctttataaactctggattgaagtgttgttgcgtccacttaccacaacctatgattttgcagagaattcatcccatcatgatggcatgttactcgtgaaaaagtctttaaaatattgggatgtctttaaaccttcaccagatacattaatggttaatagaaccatttcaggacactactggaacctcattcacttaaaagtacatgacaatctaaacgatctatttgaagagctggttccaccttctaactaacttaatttacttatcaatgtagccttttagggttacattgacttattaattgttatgttataacatttctttaatcaaaaataatttaggacaatttctcatgcgtaaagatattcatcctgcttaccaacaagtgttatttcatgacaccaatgcagacgtgtacttcttaattggtagtaccattcagactaaacaaaccaaagaatatcaaggacaagtctatccttatgtgactcttgatatttcaagtgcatcacacccgttctacacaggtgaagtacgtcaagcaagtaatgaagggcgtgttgcaagctttaacaaacgcttcgctcgctttaatcgtaagagttaatcttacgttaagttttaaccaatacacttaaaccattggaagcctaagactcatctcctccacttaggcttctttttttatgtgcattttttaatgattttctaaggtgtgtataaagttaaacttatccacaattttcacaagaacgcttctgatttttctcaacaacccatcattttttatagctctcaagctttcaaaacatgtattcaatgctatgcttaagccccatttgataggaagtttaaaattatggcacaagagttacttgcccaattacaagcaggcacagcaaaattttcagatgttttagcttatattgaagcacgctaccaacatactccaacagcttttcaaaatggcgcacagcataacgctgcaactgaaaatcaaggcagtgcgaaagttttctcttttgccaagttacaaggtttagaccaagcacaaactttaagtttatttgcagagcactacgcatctgtattggctaccccagagggaactgaccaccaaaatattcgtcagtttatgcaaaatggttgggatggtgtgaagtttgaaggtcaagctttaactgaaaagtaattaagaatttgtgaatacacgagggagtcttaccgtttattctcaaatgaaagtagctaattctgttactttggttttgcccaaagtaaccaaaggcatttgtcatcaacagaacctgttccctgtttacacttatcaactatcttgcaaaaacaagatatagctgatttcagtcaggctgttgatgactttaacgcgtatcaaatcccaaaaataaatcagaagtttttaattcgtcatttactatcgtgacaagcggcatggatgccgctgttttgctgtgctacatggatgtagtatcagcgaaacagaagatttttgcttacttttgatctttcaaaagtaaggtatgcctatacaaatgctctttgagaatatcgtaaaacggaggccgtgccgtatatctcgttccttaaacatcccaataatcagttgcccgctacccaataataagtcgccaaccccaaacacgtaaaaattaacgacccaattaaatgaatagaaatagccaacatcgccattccccacttaccactttgcaataaggtgacgatctcaattgagaaagttgagaatgtagttaaagcaccacaaaaacctgtgattacgaaaagtttatagttcggacttaaatcactatgagcaaaataagccatcgcaaaaccaataataaagccaccggccaaattaacagtaacagtacccaacggaatttgcggataaatcgggttgagttttaaacctaaaagccaacgcaaccacgccccgagcactgaacctaaggcaattgaaagtaaaggataatacataggaccatccctttagtgagatgctaaaagagcaaacaaaaatgatgggaaacgtgacatggcgcactccaaaaataagcagagtacgcaataacctacgtacccagcgctataaatacatgagggtaacgtaggcatcattagccaatacggcggtttttcaagggaggaatgccatctccctgttttaggtatattaaatcatctaagatttgattaaaacatactttttaaatcatggacgttcatcgtattgcggtaaatcgtcatggatacattcccactctgcctttgaagcagcaaaaatatgcatagtcggtttttggtctaatggtgtatctagagtcccaattcttaaacgatacagttcaggctgagcatcacgcgagctaataagcggtgaaccacattcgctacaaaaccaacggtacacaccattcacagcaaattttttgacaaggtcttcaccttgcgtaattttaaaatctgcactgttgataggagcattcgttgcaaatgctgttccattggattttcggcagcgttgacaatggcattggataatatctccgatatcgcctttaatttcatagcgaataccctgacataaacaacttccctgatagactggcgatgcttgagacatacaattccgactcctattattattggtcgctcaaaaataacacttttcacatatcaaacatagcaccgaattcgttgttatttctctaagaatgaatgcacaccttcaccagctgctcgtcccgtagcaaagcatgctgtcagcaaatatccccctgtaggagcatcccaatctagcatttcgccacagcaaaaaactcctgaagtttgtttcagctctaaacgttctgttaatgcatcttgcttaacaccaccagcacagctaatcgattcttcaataggcctaaagccatctaacttaatttgaagtgctttcattttttgcgccatcgtctctggttgactccatagtgctttatcaaccacttctctaattaagttaattttagctgtgtctaagcctgctttacgccagatattggtgagagattgttttttgctagcctgtaactttttaactaactgtgtaagctctacatcaggcaataaatctaaaaatagatttaagctttttccttgtttttgttgttctcgtaaggcgcgtccgagtttataaatgaccccactttctaaaccgtagtgagtaatcacaatatcaccatgagtaacttggctgggttcaacccacgcattgatacgctttaaaggctcaccaaaacagctttccataaaagctgaccaagtatgcaatacccctgcattacttgcttgaaaaggttcaatactagattgatccatccattgttgccaagcaccatcactgcccaattgagaccaagatacagccccacaagccaacacaaccgcatcgtattgttgggtaaaggtttcagtattctgtttattttggttttcaaaagtcactgttgtaccatgcaaattaatacaacgatgacgataaaagaatttaacctgctgttctgctaaacgttttaaccaagcgcgaagtaaaggagcagctttcatttcaacaggaaaaatacgaccggaactacccacatacgagtctattcccaatcctttcatccagttctgaatccagactgcatcccatttttcaacccacggtttgagccattctgcatggtcataacgttcaatgaactggggtaatggttcagcatgcgagatatttagccctgttttaccagccatcagaaacttacgcgcagccgaaggtttttgctcaaacacatcaatttcataagcatactgactcagtacctcagctgccattaacccagccggacccgcaccaataatggcaatctgcttattcgacatgtgtttgcccttgtagcggtgcaaactcatcaaaacgagttttataaccttcaggcttagtcataatgagctgctgacaaagctcaccacgctctaaatatttaatttcaaaatgggtacgtgcagaggtttgagcaattttttctttttggtaaggcagcttccacacatttaataactgttgttcagcttcttcaatatattcaggaatattacttgccaaagtaatggttccacctgttttcagacgtgatagcaggaactcaaaaaatggcatgttcaaccagcgttgtgccggattatgaggttctgggttcggatagaggataaagaaatgttctacttgagcaggatatagagcatgtacaacccaaggtaaagcatctgcatgtacaggcaccaagttgtctcgtggttccaaaccatgctgcttttgcatggccaagaatttttctctagttcgttcaattgcatataacgtgtgctgaggattttgcccactaaatagcaaagcatgtttacctttgcctgccccaatttccacacaaatcggagtattttcaattggggtaaaatcgcgaggcgcttgcatacgttgtgcttgaaattgacgaatctgcataatcacatcaaactaaataaaaatcggcacaagtctaacaagtcacctgacttttgcctaatctatttctcttcactttgaggttactgctttatgccacgtacatttccctgcccacgctgtggtgaaccaagtgtttgggaaggtaatgaatttcgcccgttttgttctgaacgttgcaaacttattgatttaggcgcttgggcaaacgatgaatatagactgcctacccaagatgctcctcagcaagacaagggtagtcagcatgaagatgattatgaggattaacccgctttacttgcgacaaacgggttaaattgtttttcatagccaatggtactcattggtccatgccctgaaataaactgggtttcatctggtaagctaaaacactcacgctgaattgattcaatcagttgatcatgattaccacgtggaaaatctgttcttccaattgagcctttaaacaggacatcgccagtccagagtaaaccatgattcttgttatagaacatgacatgacctggtgtatgtcctggtgcaaaacgcacttcaaactcatcttcacccagttttagcacttcaccgccttcaagccattgatcgacttttacaggctgtgggattggaaaaccataacgggccgaaacttcctgaatcatatctagccagaactgatcttctttatgcggaccaacaacaggaacactccactcttttgcgagttcacctacagccccagcgtgatctaaatgcccatgagtaagccataacgcttttacttttaaacctaaggcttctacttctttcttcaaaacagcagcatcaccgcctgcatcaatcaaaactgcttcttttgtttcactgtcccaaactaaagaacaattttgagcaaaagcagtaactggaacaattttgacttgcagcataagaacctctggctaaaacgcaattaacggtgggctaaggtatgggtaagggcatcaagattagcctgaactaaacctgcaagcaaatcaatatgcgcttgatcactgtttaaagcaggaatgtaagcatagcttccgccaccagcttgctgaaataactcagcattttgaatagcgagctcttcaagcgtttccaagcagtcagcagaaaaagctgggcttaagacctgaacagacttaacgccctgcttcgcccaatcttgtaaaagttgatcagtataaggtttcacccattcttgtttgccaaaacgtgattggaaactaattgcccattcatcatcttttaaatgcaaagcttcagcgactaactttgcggtaatacgacaacggtccgcataagggtcgcctttatctgcataaggctgtggaataccatgaaatgacatcaacagcttttcaggtttgccatgttgctcttggtaagctagaacactttctgccaacgcctgaataaacattggatgttgataataatctttaataatggtcagacccggcaaatttcgctgagtaggaatccacttagcaaatgcgtcgtataacggtgctgtagaagtggctgaatattgaggaaataaaggcaataaaatgacatgctcttgcggattagtcgccagtttttctaaaactgcatcaatacccggattaccataagtcatagcgggcaacacagttaaatcaaactgtttattttcacgctctaaataagcctgcacacgttgagtttgctcaaatacaatttcacgcattggtgagtcggtagaccataccgaagcataggcatgtgctactctttttgggcgaaaaggcaaaacaaacagatttaaaataatccaccaaatgaattttggaatttcaattacacgtggatcagataaaaactgctttaaaaaacggcgcaccgctgggacggttgcctcatccggtgtgcctaaattcgctaaaatgacagtaactttcggtttttgttcaaacgacatgtgtaaatgcctttcaattcatcttatgacactaatgtaacagctttcatggtcatatctaaattgaatcgctctaagcttttaatcgagtactccgatgattccatttataactgagcaagagcttttgggctttggtcgttactttccataaactatgttgttgatcaatcttggttggaacaatccagccttgtgattgcatttgctttttaatacgaaacagggctttatgattaatttgtgcacctgccactgcatgtgctctaggcaactcttggcgagcgtcttctaacccgtcctgatttaaatactcattgaggcaagtcccaaagttctcttctggcatggctgtctcaaaatgtttagccaaaatacttaacagttgagaccaagtcatttgtctctggcgcttaagctctttaaagttgccatcttgaaaagcctgaatttgatattcaaaagcaaaaacatcttgcggtgccacttcatttgcttgaattgatgactctgataactgttgttctaattgtaaaattttactttttaatcgattaatttcatcttccaaatgatgcgcttggcgtgcaggcacccaaccttgtcccatatattgttcaaccattaaaggcatatttaaacggacagcaagttctaaatcacgtgggcttttaaaataaaaaatatgattcgcttcatgtaataacttttttcggaatgccagaaatttctctttaagctgcggatgagtctcttgtaaatgcatatcacgactttcaggttgttcatgcataaagacgacaatgggcttcgcccgacttaacgcatattcatactctaaagaaaaataactcgcccctgaaattgattgctccccatactgactacccagcagcaaaacaacataatccgattcatcaatttgccgacgggcaagtgtcgttgttagaggatttctatattctaacccccaagcaaaaaatcccatattgactaaagtttgggaaagaaccatacgctcaggttgcatctcgcgacctgaggttgaaataaaaatctgatagcgtgtatcgagcatagcaatacccttatcgccccataatcttgatatggcctgaatcagccaagattatgaaccgccccaaataagaaaaataaatataaaaaaacgctttcttctgaatgcctacaacagagctcaactcagattgtgcagcgtccatgtcaattcttgtggaatcatattttgtaaaacaggttgtaatgcatctgcattattaccacttacataacattcaatacgtgcaacattctgacgcatttggtcacataataactcattttttattaaaatacgggctgtttgtcgggcaactgccaatcccgaatcaaccagtgtgaattggttatcaaaaagataatgaatggcttcatttaaaaaaggatagtgcgtacaaccaagtaccaaatagtccgcgccttgctcaactgcaggttgtaaaacttctcttaatgcatttaaacaagcagggctcatttgctgccctgcttctacacaagggacaagctctaaactcgttagagtcatcactttaacacccgctggaacagcaaacttttcgacaacatccttaatgagttgtccacgaaaagtagctggtgtcgccaatactgcaaccactttagaacgagtttgtaatactgcaggttttagtgccggtaccaagccaacaatcgggaagtgttcgccataatgttctcgtaaatgatcaaggctaaatgcggaagccgtattacaagctacgaccgcaattttacaaccctgacgatataaccagtcgacggcacgagccgttagctctctgatttcttcatcagagcgaggaccatacggaacataggctgtatctgcataatacacaatacgttcgtttggcaaatatttggcaatttctgctgcaaccgacatacctccaatacctgaatcaaaaataccaattggggcatctgctaatgctttaggcataggttctaattcagtaaataaaggctgtatggctgtcatggcagtactagagagtgtcggaaaatttcactctataaagcttaaacctcaagtgcctaattgcaagtgcaaattaccactttttaactgcaaaatggtttcgcctttatcattttcgaccagtgttccatagttcacgagatgatagaaagcctgacgttgaataagcgcattaataccaaatcgaacatggacataaggacgcaactcccctgcatattcccgcataaaaatcgggtgttctgcatcaactaaaatcacatcctgattggtcgtcgtcagttgtagaaactcatcacctgaaatttcaatctgatctacctgattgactaataaaggttcatcttcaacttcgatttcaatttgttctacaggggttttcaggtagaatttaccctcttctttccataggactttggtaaacaaatccaatagggcttggcgcttgattaattgaccttcgtgccaccattctccattggctttcaccgttaaatccattttaccgcaatgctttggatgccattgctctaaaggtgggattgaccttttgtgactttgctgtacaccttttaagtattgtgcaatgttcattaagtttttatcatcagataacggtatttttcccatatccgatggggaattattttgatttaccatagtttatgccttgctgacgaaaaaatatgacgactcagccaattggctagatcatggtttaaaactatactagcccaaacgataaaaggcacaatagcatatttgcgcctatggattaaaacactcacggcagcaccggatgatctgacattacggttgccacctttaagtattgaggagtcctacatggaacacatcgaacgtgaatcgatggagtttgacgttgtcatcgtaggtgcaggacctgcaggtctatctgctgcgattaagatccgtcaattagcgattgaaaataacttacccgatctttcagtttgtgtagttgaaaaaggctctgaagtaggtgcgcatatcttatctggtgctgtacttgaaccgcgtgctattaatgaacttttcccgaactggaaagaagaaggcgcgcctcttaacgtacctgtaactgaagacaaaacattcttcttgctttcagaaactacctctaaagaagcacctcactggatggttcctaaaaccatgcacaatgacgggaactatgttatctcgctaggtaacgttgttcgctggttaggtcaaaaagctgaagaattagaagtttctatcttccctggctttgctgcatctgaagtgctttaccatgaagacggtactgtaaaaggtattcaaactggtgacatgggtattggtaaagatggcgagcctacacataactttactccgggttatgaacttcacgctaaatacactctctttgctgaaggctgccgtggccacttaggtaaacgcctaattgcaaaatataatcttgataaagatgcagatcctcaacattacgggatcgggattaaagaactttgggaaatcgacccagcaaaacataaaccgggtctagtgatgcacggtgctggttggccattgtctgaaactggttcttctggtggttggtggttataccacgctgaaaacaaccaagtgactttgggtatgattgtggacttgtcttatgaaaatccacacatgtatccattcatggaaatgcagcgctggaaaactcacccactcatcaaacagtatttagaaggtggtaaacgtatttcttacggcgcacgtgctgtagtgaaaggcggtttcaactctttacctaaattgactttcccgggtggttgcttaattggtgatgatgcaggcttcttaaactttgcgaaaatcaaaggctcacacactgccatgaaatcaggcatgttatgtggtgaagctgtatttgaagcaattgctgccggagttgaaaaaggtggtgatcttgcggttgctcgtgtaaccgaaggcgaagatttattcgttaaagaattaacttcttacacagacaaatttaacaacagctggttaaaagaagagctttataacgctcgtaactttggccctgcaatgcataaatttggtcaatggattggtggtgcatttaactttattgaccaaaacgtctttaaagtgccattcactttacatgacttgaaacaagacttcgctgtattgaaaactgttgatgcaacgagcttcaagccaacttatccaaaaccagatggcaaactgacatttgaccgtttatcttctgtgtttatctcaaacactgtacacgaagaaaaccagccagctcacttgaagcttactgatccttcaattccagtgaacgtaaacttaccaaaatgggatgagcctgcgcagcgctattgccctgctggtgtttacgaaatcatggaaaatgatgacggctctaaacgcttccagattaacgcagcgaactgtgttcactgtaagacctgtgatattaaagacccatctcaaaatattacttgggtaacacctgagggtggtggtggtccgaattaccctaacatgtaattccttgcgccgctttagctgcggctcatatcctaagatgtaacaaaaagccccgattattcggggctttttattcatttacatatcgaacaaccttaccctttctgtaccagataacggtattctttatggttctgctcatctagaacttcttcttttaataggagttcgtgtcccaaatgcatacaaaacttagggatatcccaagaagtcgaagggtcagtcgccaacacttcaacaacatctcctgattttgctttgcgaatcgcctgatgcagcatcatgacaggttccggacaacgtaaaccacgcgtattaagttgtacagtaggtgaaataggttgttctgacataacaaactcgaacaaatagaattttcatattttagcataaacccatcactgtcttatgaactgtaactggcgtttacataacaatatgtgttttgtcttttactttgttttatagatgcataagggctttttcttcggtatgatcagtgtattcatttgatacattgagtctttaggaaagatcatgcaagaggaaccgagtccgtcgtggggtatgcgaggcttacgaaagtggttaggtacagcgccagaaacccgagatgaattattaaaactagtccaaaattcacgtcgttttttagaacctgatactgttgccatgcttgaaggtgttcttgaccttcctgctacaaaaattcgtgaagtcatgacgccacgaacagcaatgatcagtatgcaagaagatgatcagttacttgatattcttcacgtattggttgagtctgctcactcacgttttccagttttctcagctgaccagcctgataatgttgttggtattttactggcaaaagatttactaccatttttgactgaaccaaatactaaattagatattggctcgctcatgcgtcagccattatttgtgcctgaaagcgcacgttcagatcaagttcttcgtatgcttaagcatacccagacccatatcgcgattgtgattgatgaatatggatcaacagcgggactggtcacgcttgaagatattcttgaagagatcgttggtgaaattgaagacgaacatgatactgcggatgaagatgcacagtacattgttccagataacgaccatacaatagcgaatgcatggatggtgcaggcacttacaccaattgaacacttcaacactgttttagatgctgatttttctgacgatgaagtagaaactgtcggcggtttattgcttcaagaaattggtctagttagtgatttacaaggtcagactgttgagcttggaaattggttatttacgattgttgaagcagatgcccgcactattcatctgattcgagctgtacgtcaatgagagcatactttgaaaagctgttagattcttcgcaacaacaaaaacagcttcctttaatttttccattgctcattgctttattttcaggtgccgtgttcagttttgcactggcaccttattattggtggtggctggcaattttgtctcctgctctactctatgcgacattgcataaccgctcagccaaacaagcatttgcaattggctggagctatggctttggtttatggtttgtcggggctttctggctctatacgtcgatccatgtatatggcgataccaatgcttttctaagcgtatgtatgattgctgttatggcccttgtgatgggtttatttacagcatttcagacatggatttatcgacgcttcttccctgaaacaccgctgactttcgcccctctctggattatttttgagtgggctaaaacttgggtatttactggtttcccttggctgtttgtaggttacgcttttactgaacgtttactcgatggttatgctccgctatttggtatttatgcaatttcctttgtagtaattgtattggcatgtgctttagttgaaattctacgtaagcgtattttctggattatccctgctgccctattggttttgggtgcatggggagcatcatatattcagtttgtacaacctaaagcggctaaaccgcttagcgtttcgctcattcaaggtaacattccacaagatttaaaatggctaactgaatatcaagttagaacattagaaatttatgctggtttgactcaatctgaatggggccgtgacctcattgtatggcctgagtcttcaattccactcttccaaaccgacattgaaccgtttttggatgcaatggatgcacaagctaaaaagaaccataccgcttgggtaactggcataccttattgggatgtagcgaaatcgcatcaagtcggaagtccactgtattacaacagtattatggcctctggcagcgattcaagcggcctttataaaaagcagcgtctcgtaccttttggtgaatatattccgctgtcaggtttgctttcttgggtgttaccagccatgcaaaatgatattagcatgagcggttttacacgtggtgagagtgatcagaaaccacttttaattaaagggcacgcgcttgcggctgcaatttgttatgaagtggcttacccgaatctgacacgtcgtaatgcagaagatagcgactttttggtaactgtatctaacgatgcttggtttacgggtactgctgggccttggcaacatttacaaatggtgcagatgcgtgcgaaagaaaatggtcgctggtttattcgtgcaactaacacaggagtaacagcgtttattgatcaaaatggtcatatcactgaacaagcaccgattgataaagagtttgtcttgagaggcgatttaccagccatgcaaggtcaaactctctataaccgtctaggtgattatccaattttaggttttgcaatattactgctggttttaggttggatctatcgtccacgtaaagtagacgtgtcttacaaatcacgtcgctaaattataataactttgtacccagaggtacttcaaactctgggatacaaagtgctacatccccatctgcattatgaaaccctgttaccaaacattccgattggataggaccaatttgtttcttagggaaattcactaccgcaacaactaatttaccaatcaaatcctgcggttgataaagtttagtaatctgtgcactcgatttacgtacacccaattcttcaccaaaatctacatgcaaaatataggcaggttttcgcgccttttcaaaaacctcagcttgaataattttaccaacgcgcagttctacttttaaaaagtcattccactcgatttgttccatttcatatttctcatcttcttaaattgctgatttgaagcatataatatgtacaaatgaagaaacaccctgttttaagtccagttaaaaaataaaacgtagatgttgagtctacgttttatttaaaaattctgttttaaaataagattaaaaagcaatcgataattgcaaagataaataagcaactaaactggataaaaaaaccatcggcacataacgataagctttaaaaagcaattgttcgtatttagaagccatctgtttagtttgccatacactcgtttttaatgcggtaaagaagctcaccattaaccaagcgcttacaatacttaaggcaaagaaaccaatcatgatttggctacttccctcagtactcaaccatagctttaatgaaacttcagcaataggtaataatgctaaaatcaataggacagatttaagcatcgcccaatgaaactgattcagctcatcaagtacgagaaatgctttcatttaatctctcccattcattgaataaagtgctttttatttattatgcaaagcttttatttaaatatatagcttattttctcttatattttaactttcttgtaactattaaatatgggaataattcttattttaaatctcaaatctagatattaacttttttactttattttcaatgcattattatatttttatgattaagaaagattatcaattcggattattgttttatcttattaaccgaatcgataatctctcttacattttaattaaggctgataataaatatcggcatcgttaccttcaccaccttctttaccatctgcgccaaatgaatatagatcaaaaggatggccgtcttttccaggtacgacatattggatatcatttttccagctatctttaggataaccacctttcacataaccacccggcatccagttttttgctgtagcaggttgattaataagcgcatctaaaccaccttcttgcatggttgggaaatgcccattatcgagcttgtattgatctaaggcacccgctacccctttcaaagtaatttgagtcgtatcaattttagctttttcactacggcccatgacgttcggtacgattaaagcagccaacacacctaagattacaatcacgaccataacttcaataagggtaaagcctgaggcacgtttcattcgagcacggctcgaacgtgtcgcaagtccgaaagcacttgaagagcaaacatctgatacagagctatgctcggaatggcacgttggttcaaactgatttgaaaccacagattcactatgttgtttcatcgctgtttcgctttgaatattttttactttcatcattatctctaatatcaaagttattaaatcatattgttcatatttacgattggcagcataaccgcaattacaataaccagtacgatgcttgccattaaaactagcattagcggttcaagtaatgctaataaggttgagataaatgtcgtcacctcgcggtcttgcatggtcgacgcacgttcaagcatacggtcaagctcacctgatgcctcaccacttcgaatcatttgtaccatcattggtgggaaataaccactgcgctccagttgcgtaccgaggttaccgccttcggtaacacgctcagccgcttgggaaattgaatcacggataacccagttattggtcacagcagcaccaatctttaaggcatctaccaatggcacgcctgaacgagtcaaaatagataaagtactggcaaagcgcgcagcattaataccacgggatagtttaccgaataatggcaatttgagtgttaatcgatcaaaagcataatgtcccgcagtagtttttaaaaaacggacaaaagctaccacccctacaattgcaaaaagaataataaatacccatgcatgacggataaaatcactcgctttcattaaagcaactgtaatccatggtaaggcatctttgctttgatcgaaggtttttacgatctctgggaccacataagtcattaatcccatcacaataccgaaagacatcagcattaaaatgattgggtaaatcatggcaccttgaactttcttttgcatggcaaaacggttctcggtgtagtctgatagctgatctaaaatgagatctaagtgtcctgaacgctcacctgcagcaacagtagcaatataaaggtcaggaaaacgccctgactgttgcataccttgtgcgagtgaatgcccttccaatacttttgaacgaactgagagtaaaagattttgcacatgtgctttttcactttgtctgctcacggcgcggagagcttcttctaaaggaattgcagcagcaaccaaaactgaaagctgtctggtcatcagtgctaaatcgtaagcactaaactttttttggaataatccgtggctttgatgcttatctttttgttcaaccgggtcaacgctaatcggagtccatgctttatcgcgtaattgttggcgaatctgacgtgccgagtctccttcaagcacccccttttgctgcttccctgaagcatcaatagcagtaaattgatatgcaggcatggtaatgttctaattttccaaaaataatagtcgctgctgttgcatctatgctacgcaatcattcatattcattctatagcctgtgtagaatacccaagtcctcttcacgacgctatgccgttttttaaaattgacgaaatgagcctctatgaccataacgccaaagcctgattcagttgtttatcgtgtgcgtgttgccgtacctgtgcatctgtacgacacttttgactatacactcaccaaagcacaatatgaacgggctcaagtaggttcacgcgtcgcaatttcatttggacggcaaaacctgattggtatcattactgaaaaagttgacccacaagaatcatttacaggtcactttcagcttaaggccatttctgaacttttagatgatgagcctattttagatgaacaagttttaaatttattgacatggtcagcacaatattaccaattcccgattggtgaggtgatgcagactgctttacctgcgttattgcgtcagggcaaacccatggatgttttatttcatctatggaaaatcattccatgtgataatgccgaagctttactaaaacgttcaatcaaacagcaagacgcttatcaaattttaaaattacatcctgccggaaccactgaaaatattctcaatttaagtggtgtagaaactgcaacacttaaagcactgcaaaagaaaggtctcgtagactgtacgcttgagcctcatgactttagtccatcccctgtgcaattggcgcaaatgccactcacgctcaatgaagaccaaaagaaggccactcagcacgtccttaatgcacagcatcaatatcaagcctttttattagatggtttaacaggaagtggtaaaactgaagtttacctgcacatcatgcacgaagtgctaaagcaaggtaagcaagtactggtgttagttcccgaaattggtttaacccctcaaaccatttcgcgctttaagtctcgttttaactgcgacattgctttattacattcggggttaaatgactctaaacgcctacaagcatggcaacaggcacagactggaaaggcctctattattttaggaacacgttcagccatttataccccgctgccacgtttgggccttatcattttagatgaagaacacgacctgtcttataaacaacaagaaggtttccgttaccatgcgcgtgatgtcgcgctttatcgaggacatttacaaggctgtcctgttcttttaggttcagcaaccccaagcattgacagttatcacttagtcgaaactggcaagttaactgcacttcagctgaaccagcgtgcaggccatgcgcttttaccaaaaatgcatttgattgatcttaaaattgtcaaaaaacagcatggtattagtcagcctttaatcgaacagattaaaaataccctagcaagaaaagaacaggttttaattttcttaaaccgacgtggttatgcacctgttctggtctgtgaaagttgtggttggcaagcgaattgtcctcattgtgatgcacattttacgttgcacactcagccttattcttacttacattgccaccactgtggcacagttcatcgcttgccagaccactgccctgagtgtcagcaaaaaagcctcaaaactttaggtgctggcacagccaaggttgaagagcatttacaagaattattcccagatcatgatgtgattcgggtcgatcgtgacagcaccagccgagtcggtagctggcaaaaaatttatgatcgcattcagcaaaataaaccttcgattttgctcggtacgcaaatgttggcaaaaggtcaccattttccgcatgtgaccttggttgctattttagacattgatgcaggtttattgagtgtcgatattcgagcgccagagcgtactgctcaattgattgtacaagtggctggtcgcgcaggtcgtggagaacataaaggtcatgtttatttacagactttaaggccagatcaccctttattgaccacgcttattgaaaaagattatcgggcagtcgcgaaacaaacattggctgagcgtaaagttgcattactgccgccttatcgctatgccgtacttatacgcgctgaatcgaaagatcgcgactataccttgcattttttaaatgaagctgccgagcaacttcgccaaatagcaggtgatattgttgatatctgggggccaattccagcaccaatggaacgtaaagcgggacgttaccgcgcacatatggtgattttgtctgctgaccgcgctcgtctgcatttttacttaagacaatggtgggctcaattggttcatgcgccaagacagcatcaactcagactctcaattgatgttgacccgcaagaatttagttagatgatttgaatatcatggtgtgaagaacactttttccctttacacttaaaaaagatcaatacattcggggcaatgaatgtcattcctactgcaagcaactatttttcttggagcatctctgattttagtccctttgggcaaacgcctagggattgcaacagttttaggttatttatttacgggcatacttcttggcccgagtgtgttaaatattgcccatgaccctgaggccattatggagttggctgaatttggggtcattttacttatgttcctgattggtctagagctccgcccacaacgtttgtgggaaatgcgtgactctatatttgtgatgggaagtttacaggtcgtgattacgggcataattcttatgctcaccgtattgctgctatttcaacaacaccttgctgccagctttgtgattggttttgcgcttgcgctgtcttctacggcctttgtattacagcttctgactgagaaacaacagctcaataccacctacggtcagcaatcgttttcaattttgctttttcaagacattgcagcaattccattacttgcggtaattcctcttctggcaggaaccgaatctacccatcatggtattgcttattttgcagccatcatcgcgacgtttaccggcttgttcctatttagccgttatgtcatgcgcccatttttccgttttgtcgccaagagtggtgcgactgaactgattacggctgtagggttatttattattcttgccgttgtgttactgatggacactttaggcattagtacaacattaggtgcttttcttaccggagtccttttagcggactcagaattccgtcatgagcttgaagcgagtattgccccgtttaaagggctattacttggcttattctttatgaccgtaggtatgacgacacaattgtcgttactgattgaaatgccttggctcattattggtggagcaatcggcctactcgtcatcaaaaccctcgttttaactgccattgcccgctataaaaagtacagttggaacaatagcttgttactcgggacttgcttggctcaaggcggtgaattcgcttttgtaattttgagcctagcaaaaagtgaaaagattttaacggatgccttattagagcctgtcacgttgattgtgaccttatcaatggtccttaccccagtaatttactggattatggcctgtaagatcattcccctttttcataaagaattgccacctgaatatgatgagattcctcaacaagataatccaattatcattgctggttttgggcgctttggacaaattattgcgcgtattgcccgcttacagcacttaggatttaccgccatcgataacaatcttcatcaagtggactttgttcgacgttacggcggtaagctctattatggtgatgtcactcagcctgacttactccgctcagcaggcattgaaaaagcgaaagtatttattttagcaattgatgatgtcgaagactctatgaatgtcgcacgtcatctcagattgaactatccaaacctaaaattactggctcgtgcccgtgaccgccaccatgtgcacctattaagagacttaggtgttgaacatatttggcgtgaaacctatttatcatcattaggtatggcttatcgtgctttacgcgaactcggtatttccgatgaacaagcttataacaatatcgaaatctttcgggattatgatgagaaattactcatacagcagcaaagcatttataccgatgaacaaaaggtttttgaaactcatcgtaatgctctggcagaacttgaacatctatttgaaagcgatgctcaacaagccacatcgaagcacgacgttaacttaaagcgtcatttacaaccaaatcgtatcgacattacacgagatcacgaagaataacttgagatttcgcaaaatggctatattaaggacttattcacattgcctaaatgattgcgacaatcggtacaagagttgccgttgtcctgcttgcagcttcgctgcattccctaagcctgattaaaccgaaattgttataatctgcttagggccctggagaatattatgtctgatttacgccaacgcttttatatagaggactttcctgttcgcggtgaagtggttcatctagaagaagcattaaaaactattttagctcaacgcgactacatgcttgcggttcaaattctattaggcgagatgttgagcgctacagcattacttgcgagtactttaaaaatcaaaggtcgtatcagcttgcaaatccaggctaacggctctttcaaatgggctatggcagaatgtaaccatttaggtgaagttcgtgctttagcagactacgaaacagatccacgttttggtgaagcaacagatagcagcactgttttagcggctttggttaaccctgttttatttattaacatcgaacctgagcatggtgagcgttatcaagggattgtacctcttgatcaagcaaatttagcaggctgtttaatgcagtactatgacttgtctgcacaaattccaacccgaattgtactggcaagcaccgcacagcgttcaggtggtttgctcattcagttattacctcgtcatgatgaggaagagcaaaaactggttgatgaagatttatggccacgtttaaccatgctaactgaaacgcttaagtcagaagaactgacagagctttcagcaaatgagattttgtatcgtctttataacgaagaagaagtacgtttaccagaagttgaacacttaaaatttggttgtacttgttctaaagaacgctgtgccaaagccctcattcaaattggtgttgatgctgttcatgaaacattggaagcacaaaacccgattcaaatggattgccagttctgtaacacccgttatgagttcactgctgaagaggcattgggtctgtttggtgaacatttgagttaatcacctacttcataaaaaggcgggtaatccgcctttttatttatctataatttttttgatgataattttcagcatgttattttaaatcagttaatatgagcttacttgataacccaataaataagatgcttatatctcatgaattattttgattattttctctttatttttagtgtcattattatgattgcgacccctggccctgtcatgattttagtggcaagtgccggacttaaaggtggttataaaaaagcactagaaaccatttttggtacaaaccttgcctctctcgttttaatttttatttcagtactcgtacttaaaggcgtattgggtattaatgaaaattatttaaatattatccgtgttttaggctgcctatatattggttatttgggttttagtattctcaaagaagtcattcaagctcctcatcctgaagcaattcaaaccgtttctgctcaaaatggcggttttaaaaaaggctttttagtgggtatttcaaaccctaaagatattattttcttttcagctttctttccgcaatttgtttctatttcacctcatctagatttaagtttaactattcttacgctgacatggatagttttagactttttaacgctatctttagtctatatatttttccgccgcctctcgaacagccatttatacccgaagatcctcggtttatgcggtctattactgttagttattgccgtttacggtttatatcagacattcatttaaacaatgagaggcatagctctcaccgttctatgtctcttttattttgctcgccctatttcgcacgagaacaactcttatacaatctagctcattgaaagctttaaaaatcgtttcataatgaaataaacaacaccatcgtgataaaacattatggccaaaaattattatgaagaattaggggttaaacgagaagcctcagctgatgaaattaaaaaagcgtatcggaaattagctcgtaaatatcatcccgacatcagcaaagaaaaagatgcagaagaaaagatgcaggcaattaatgttgcctacgacaccctaagtaacccagagaaaaaagctgaatacgaccaaatgttagaccacccacaaggttttaatggttttggtcaaggggcagctcaaagtggtttcgatggtgccaggttttatcgtcaaggttttacgggcggtgagcaagcagactttagtggctttgaagacttatttggacgctttggtgcaggctttggcggtggacaacagcaatatcaaagacaacaacgtagttatcgaggtgaagaccagcatgccagcatagaggtcgatcttgatattgcttaccatggatcaacacaacacattaccctacaaattccaaccattaatgcctatggtgagccagaggtacaacgaaaaaccttacaggtaaaaatacctaaaggcatgaaagaaggtcagcaaattcgcctaagtggacaaggacaaagtggtattaatggtggtgccaatggcgatctttatatcgagattcagtataaagatacagatcgtgtgcatgtcgaaggcagtgatgtatatttgactgtagatgtagcgccatgggaagccgcattagggcaaggcattgaagtaaaaacgcctgcgggacctttacacgtcaatttacctaaaaatgcaaaacaaggacaacagctacgtttaaaagacaaagggataccaaataaaacgccaggccatctttatttaattttaaatattgtattcccaccggcgcattctgaaaaagaaaaagaagcctatcagcaattggcagaagcctttgcttcattcgaacctcgttcatctcattagggagcaagatcatgacaaccatccattatcgagaaattgtatgtgacggccacacctttagtgctgaagtcgttgatgaacaatgtacatttgacttgcaacagtttgctcaagcctgtggtcaaagcccagactggattctccagctcattgagtacgatattttagcgattgatacaccacctgaaaaacatcaattcatgggtgaagatgttattcgcgctcgtaaagcgtatcgtttgcaacgtgactttgatgcaagccttgcagctgttgcggtgatgttagatttgattgatgaagtgcaacaacttagaaaacagttgaagcattttcattgaggaatagcattaatacagcataaaaccctagttgaaatctgatagcctggaaagccatctgcaacctgcgtggtatcaatcagataatggttttgtaatactgttatttaaaaataggtattgaacaggttttgcagatggtaatggttttgcctacttttgccgaaacaaaagtaggtcgaaccgaaggttcatgactatattaaataacaagtcagcaagacccagtcgtgcagaaataaaaatttatttcaaccgagtaatcttttccacttccttcaaagtctgcttaatcggttcatattccaaaaaccaaaacaaattcatacgatcttggcgatgctgctgcgctagtaaatcaatcacacttttttcaccacgccccaccaaatgctgtctataaaaatagtagagcaataaaatggtactgagcagcataaccccaagcataatccaaaaacctactggtgatttaagcccgggaataaactcaaagttcattccataaatacccgttaaaagcgtaagaggcgcaaacacagcagtaataatggcaagaatacgcatgttctcattggtctggttagcaattgccgagaaatgcaaatctattgccgattgaatcgcactacgtaaacgcaaggtatgtttttgaatacgttcgacatgactcattaaatcgtttaaacgcactaataaaaggtcttgagaactatgcgtcttctctccaataacatgatgatagttttctacaatttcatcacgaaactcttgtaaggtttcgatttgttcttcgcatagattttcaacctgttgaaaggccatattttcatgaaacagttgatgccactgcttaaaacgccgattcccttgtaatagctgttgttgccaatgctcgacccttctggtcaaaggtgaacgaatatcaaggtaaccatccaccatactattgagcagacgtaaacacagatctacaggtgaattaggcagcttacgggttttattttgctcttcgagagttttacataaaatattttcaaggcgctgaatataattttcaatcgacttgttgccctgttcacgtacgctaataagtactttaggcgtaaaaataaaactgatcggtgtggtggctaaaccaaatacactctcatgtgattcgccatttttaatttcatcatccggcgttacgagctttctaaaaataagcaggtcgtattcttcaagcgtatcaaatgcacaaggatgttcgatattcgcaatatctcgcatatgaaactcattaatggatacatctgcaagttgctgaattttttgttgccattcttcattctggctcacaacatccgatctcacactatcaatccagaaaaactccagaatatgttcagtgtgcttttcacggcttataaaaacatagccgtcgctttgatgacgataaaaataataaacctgcataccatgtcgatctattggtgtattacttgcatcatgccataaaaaaagcccgcatcaagcggacttttttagtgagttaagcaattatgcttgctcaatatctttcatagtcaatttgatacgaccacggttatcaacgtcttgaacctgtacttttacttcctgaccttctttaagaacatcagttacgttcgcaatacgctcattagagatttgcgaaatatgaagaagaccatcagtacccggcatgatgtttacaaacgcaccgaattctacaatacgaattactttaccgtcgtagatcttacctggttcaacttcagcagtaatcgcttgaattttcgcaattgcagctttagcagcagctttagtttcaccaaatacgcgaactgtaccgttatcttcaatatcaatagcagctttagtttcttcagtgatttgacggattgttgcaccacctttaccaataacatcacggattttatccggattaattgtaatcacttcgaatgttggagcgtgcattgaaatttcaggacgagcacgtgaaattactttgttcatttcattaaggatatgcatacgaccagcaaatgcttggtttaatgcaacttccataatttcttcagtaataccttcaatcttgatgtccatttgaagtgcagtaataccgtttgcagaacctgctactttaaagtccatgtcaccaaggtggtcttcgtcacctaaaatgtcagaaagtactgcgaaacgctcgccttccttcactaagcccattgcgataccagctactggtgctttaagcggaacacctgcatccataagtgataatgacgcaccacatacagaagccattgaagatgaaccgttagattcagtaatgtcagatacaatacgaataacgtacgggaagcggtcagctgcaggaagaactgcttgaacaccacgacgtgctaaacgaccatgaccaatttcacgacgcttagggccagattcacggcctgtttcacctactgagtaagcagggaagttgtagtgcaacatgaagttgtcagttttagtaccagcaagggtatcaaccattaaagcatcacgagtattacctaaagtcgttgttaccaacgcctgagtttcaccacgtgtaaataatgcagaaccatgtgcacgctcaagtacgcccacctgtacatctaaagcacgaacagttttggtgtcacggccatcaatacgtggtttaccagataaaatgttgtcacgtacagtacggtatttaagatcttcaaataagtagtctacttcgtcagcaataccgtctacatcttcttcaggaacgaattgagcaacagcttcagcatgaagtgcatctaatgctgcataacgatcttgttttactgcaatggtataagcttctgaaatttttgcttcaaatgcttcttttaattttgcacgtaattcttcgttgtgtgctggagcaacccagtcagatggtttcgcaccagcagcagctgcaaattcattgatcgcttgaattgcaatttgcatttcgtcgtgaccaaaaagaaccgcacctaacatttggtcttctgaaagttctttcgcttcagattcaaccatcaatacagcagactctgtaccagcaaccacaaggtcaaggtcagactgagccatttgctcaaaattcgggtttaaaacatattcgccgttgattaaaccaacacgtgctgcaccgattggaccacggaatggagtacctgcaattgctaacgcagcagaagtacctaacattgctgcaatatcagcttccatcgttttgtcagaagaaaccacagttgcagttacctgaatttcgttgtagtaaccttctgggaacaatggacgaattggacggtcaataagacgtgaaattaaagtttcagcttctgaagcacgaccttcacgcttaccatatccaccagggatacgacctgctgcatattgtttttcttgatagttaactgttaaagggaagaaatcctgaccagcttttgctgttggagcagcaactactgctaccaatacagttacaccacccattgtgattaaaactgtatttgcttgacgtgcaacgcgacccgtttctaaaacgacttgatgctgaccaaattggaattctttacgaacgatgttaaacattgacatgtattgtattttcctaattttattctagtgagacccctaaggtttggcattcaggctacaactatcggtaggtaaatgacaaagcttagaagccatcacactagaccaaaaattttaaataatattaaacgcaaagaaggagcgcacaagcgccccttctataaatcgcctaatggtttattagacgaaactttcttttcagaaacaaagcatagcaacatgcgataaaccgaaaacaaagcaaaatcgaattaacgacgtagacctaaagcaccgatcaaagcagtgtaacgctcgtggtctttaccatttaagtagtcaagcaatttacgacgttggttaaccatacggatcaaaccgcgacggctgtggtggtcgtgtttgtgagctttgaagtgaccttgtaaatcattgatttgagcagtcaataaagctacttgtacttctggtgaaccagtgtcgttttcagcgcgagcaaatttagcaatgatctctgcgcggtctgcattagttaaagccattcgatttctccgagatgcttaaaaaataaaatgatatgaatcagttgagcgcaactgactgccgtgcatcactacagcaagttgcctattttaaggtatctatatatggattgcaaaattgttttctgttacctgtcattttagacactgacatcagcttcttaaccctgcacacttggccttgaataaaaagaaagaaacgcgagggacgtgtgaaaatattttcgaccaatacctgtccggtaccgaatgaccttgaatcggtcattcatcacaaagatgaagtacctgccgaactaggtggaatgagtgaacagcaagttcaaaaaatctggaaaagtattgagtcactctacaaaaccggaaactatccgcttattactttttgcttacgtcgacaggggaaaattttattaaatcgaagcattggctatgctcaaggaaactcgccggctggtctgcaagagaatgcactcatcgcaacgccggatactcccgtttgtctattttcagcatccaaaatgattactgccatgttaattcatcttttagatgaaaaaggcgaaatcaacttacttgaccccgtgagctattatattcccgagtatggggtgaacggaaagcgccgcgcgacaatctttcatttgttatctcatcgtggaggtattccttatgttgatggagatgtcacacctgaactgctttttgataaagatgaaattttaaggcgtttatacgcagcaagacctgtttctccagcgggaaatcacctcgcctatcatgcagtaacggcaggttatatcttaggagaaattattgaacgggttacagggcaagaccttcgccaatttgtgcatgagactatcgagaaaccgatggatatgccctattttaactatggcttaaaaccagaatatcgtgctgaagttgctcttaattgtgcaacaggtttacatcctcgcttaggaacagatcattatctcaatcatgtactaggtggaggcttacaactcgctgtagatgtcactaatgatagccgttttatggataccatctgccccgccggtaatatttataccagtgcagagcaagctggacgcttctttgaaatgcttttaagtgggggaagctaccaaggcaaacaaattttaagcgagaaaacaatttttagagcaacgctccctaccacaggagttaacattgaccgaactttattaataccgatgcgctatgccttaggaccaatgctaggcagtaatccggtaggcttatttggtccaatgactggacaagcttttggtcacctcggtttttccaatattttgtgttgggccgacccagagcgtgatatcagcgtttctttgttaaccactggcaaatctgtggtcggtacccaccttcctgctctagccaatctgctttatcaaatttcgactcaatgtccacgaattcctagagatcaacgccgttcactatttggtagtgattcgcatgaaaccgatctggtatagctaaaattaactcagcggcaaaataaaaaacccaagcatttctgcttgggtttttggcgctgtagttgttgtttatcgtgtttatcgctgttcttattgttatgtgtgagatgctttccacatccttcttctcgttttactcacttccgttgttttagttctatttccttatgggatgtattttgtcatatccaattatgaagaaaagtagtatttttcttatcatcatgtaagcgaaaacgtacaggtctgtctaatatttatcgtttatctgtaaatgctaaataacatacggttctgtataacatttaacttaacaattcacgcaaaaaatgcttatttaagaatcatattacaaataaatatattaaaaattattgagttaaataattgataatataagcaagaaatagggtaagccatctaaagatttatgcagatattttggtggggttaagacttaaatataaaaaagccctgtagtctctcccaaaactacaaggcttagcggctgtaagtttcctctttattcacctacatcattgtaagttcgcagtctctcgacttaagttattattattgtgcgattttgcccgacattccttgccaagctcgttgtgcgtttataatctcaaaaacagggtgggttctctagcagcaaatatctcgaatccatgtaagctttttcttacaagggtaaaaatattaagtttggcttaacgaactaaccgattaactttttcaactaaaccgctttttcttgtcgtgcgaactgtaaaagattgaagtaacgcctctggatcgaccaataaactcactacttttttggctcgtgtaatcgcagtgtagatcaactcttggcttaacaaattcttggcagcctgatcaagaacaacagctgtatgggtaaattcagaaccttgtgatttgtgaattgttaaggcaaatgcactttgaatacttttaggtagccgatttgcagcaacccacttatttaaacttggaaaatacacttcaaactgttgcggctgggttctatgttcaaaacataaaccaatgtcaccatttgaaataccgagctggtaatcgttataggtcatcataaccggacggccaacataccatcctcctaaagtcacaatacctagctgttgttgtaaccagcgttcagcatattgattaagttgctgtaaaccaaatggtccatgacgtacggcagttaaaatacggtagtcatcgaatgacctaacgatattttcaatatgttcaagtgaacgatcatcttgtatataagcttttaagctttgcacatagccttgaaaatccaccatcaatttttggtagtaagtttctagcgctataggtgactcttcgggtaaatattcaagctgaaccacatcgggcatgtcggtttctaaaggtattgaacgtaactctgaaacctgaacaatatcgatttcaaatttttgtaaaatttgctcatggttgatttgactggtttgcatttgaataaatcgggcaacctgaccaatcaaagccccttccgcaaaacgacggctggtttgaaggtgaacacggttttcagacaaagcctcgatttgctgtaaatctgcaagtacagctccgacgtctacggaagcaagctggttggcatcacctaataaaataattcgacaagactcaggaaccgcttcaaataataacgttgccagatttaagtccagcatagaggcttcatccaccacaataacgtcataaggcaaaggctgtttttgattaaaccgtggagtttgactatgccccatacctaataatcgatggatagtttgggtactttggtttcttagctcagcacttattaaccccgactcaagcagttttgggtcattaaaggagttttgtaaggcttcttgcatacgctgtgcagctttacccgtcggagcagccatcgctacacgaatatgtggaattgcctgactaagcacagcaataatacgagcgagcgtataggtcttacctgtacccggcccacctgtaataatacttaagctctgccgagtcaccatttgcaaagcagcttgctgatgaggatctgttaataagtctaaatgctcttcacatgaaacaggttgaattggttgttgctttaatcggcgaatttgctcagctagacgttgctctaggttccaatatcggtataatgccaacccctgctcgtcgtggacacaaggggcaacttgagactttgcttgttcagcagatatcaccagttggccaagtgtttctatttgctctgggctaatctcaatacaactgtcaccctgcaagctcgcttcaatcagctgctgcaaaaaataagctgcctctggagcttgtgtctgtgcagtaaacggggcttgatttagaaaggtactccaagtcgttaaccagcttaaatcgctttgttcagggctatttagattgtccacacacttatccacctagttttccacacgcttgtccacatggttatagacaggcttatccacaccccaagtatttgttaattttaaaattagatcatttatcagcattttttatgcaattttatcctcagcaaagtaccctaaaatagcatcgagtcgtagaacaaattctgtacttggctgccaataataataaccctgctcagcttcgccattcataccgcgcaagtaaagataagtcgccccacctaagtgttgttcaatatcataattctgcattttgacttttaaataacgatgtaacgcaaccaaatacaggcctgcttgtagccaatagctggctaaagacatactttgtgcaatgctttctacactgtaatcagcaaggttttcacccaagtagttactcttatagtcagcaatgtgataacgctgtccatcaaaataaaccaagtctatcgaaccatttaaatagcgtgcagaacgagcctctaataactcgggcatttccataccatattcagcaaacagctgctgaatacgtttcatggctaacacacgatccgacagtgccaaataaaaaggacactctgataaatagtgctctggctgtaaccgatttaggcgaaaaccttgatataacggcgtgcttaaaatctcttgcaaccattcggctacagcgtgataaagcgaatattccgcttcttgttcttcgggaaagctttcttggtatttgattaataaatcttgccacaaactactgtagtcatttttaaaacgacgacgtatttcgcttacccactcatctgaacattgaaaatcaatatgctcaaaaatttcatgtaagaaattacctgcgagcgtccctctcggaaaattgcttttgatccagctaatgggctgtgctgcgggcgcctcaacagaaataacctgatcgagttcatcttcggctaaaacagcttcatggctctgactcgcgagtaaatctgtacctactttatgtcttaaatgctgtgccagataactaaaactggttttgcctctcgaataaaagcgctgatcaggaaaatgctgcgcctgtatctcaataatattgatgtgttgatttaaatgtcttgcagcaggtggttgctccaaaattatttcatcggtacaacaacggtgctggaatggttccgctctgtttttccaaaatgccaaacctgaaacagacttgccatccgtatcttgtaagagcgcgtaaacacgatgacttgcccgggttaaagcaacgtaccatagacggttttgttccgccaaagcccgttcttcatgctgcttcaactcattttcgtttaaatatgttttatcggcaatcgcaacaacacgttgtgttagagtttgagccgactccgaaaccgttatatcttgggtcgagaagttaagtgttttgttattttcccgaaatggcttgtcggccccgagcaaaaagacaattttaaactcaagaccttttgactggtgaatggtcatgagctgtacgccagcttcactcgacaatctacgctctaactcccattcacgatcaagcggtgattgtaattgcttgagataccagtgatagagattttgcgcgccctgatatttctcgctatgttggctcaaaatttcggtcaaatgacgcaagttcaccacaacccgctcattatctttactctggacagcaaccagatttttccaaatgccaaattggtttaaacattgctgccatgctactaaaaagccctgagctgaccacaattcccgaatagtatcaaaacccgtcataaactggcttaaaccttcggccgtttgttcgagttgcaacagctgtttaaggtccatagcaaataaacggctaatcaaagctcgtttcactttggcctcatcgtaaggatgaagaatcgcagtgagtaaggccccaacatcctgagctattgtgcaatcaaaaacacttcgttttgatggccgattaactcgtattcctaaacgttctaattcaaattgaactttatcaagaccatcatgattacgcgacaagaccgcaatatcatcttcatttaaggtttgagtctgagcatctttttgaaaataaagttgtccagcatgtgactgattgagtaaatcacgtattttccacgcgacttgctgtgcttccgtttccttgtcttttagcatgagccaacgtaaaggatgcggattaggctggttttgatcaattaaaaccggatgaggtcgagtccctgcccgaatcgggtcatattgaacctgttcaccaaagtcgatttgcctttggaataacgcatcaaccacttcaaccaagtcagcgactgaacggtggttatgaattaacttatattcgcgaccatgctttgcctgaatatctttgtaggcattcaagaaggtgagcatatccccaccacggaaaccgtaaattgcctgcttacggtcacccaccataatcatgcaacctttttggtaacgttctggatgacgccaaatgctggcgagcatgtcatcttggtcttggttggtgtcttgaaactcatcaaccaaaattaaggggtatcgagcctgcacaaatacggcgaaacgttgcccctgctcgccctttaaagcttctgacaaagtgcgaatttgctgagaaaaggtcgtctcgcccttgttttgtaaaacctgtggtaaacgttttttaacctctatacacaaataggcttttaaataaatatgaagctgatcgaactgttcagcatagtttttcagcacaccaaacaactgctgaatctgctgaatacaaggatgctgataaaatccatctgaaatttcggcaggacatttcttgaaaactttctgatcggcaagctggcctaaaaacttaaaaacgagttcccgttgtattgccaaagacccatcaaaaactaaaatactgtcgctttgctttaaaacttgtaataactgtggcaaacattcactaaataacttattaaatgctccattacgaaatattgtgccgcttacatgtttatagtggtcgccatcaagcgagtaatacggttctagaagactgatatcaatttctgctgccagctgtttgagctgagcaagctgttcaaactgaatggtaggcttttcgggaagtttaaagtgagccgaactaaaattcagtgagtcttcgaccagtttgacaaaactgtcgacactttttaactcacctgccagatacaatgcatcaatcacggtttgaggctgagactgtatccattcacgtaaaacatcatgaatcagttgtcggctataggttttggcatcatcggtaatttgggcacgttcaatttttccgctctcaaaagcaaactcacgtaatagcttttggctaaagctatcgagtgttccgacaaatagctcatctagctgatcgatcacgagctttaaacgctcacaggcataggcaatacgtgtcgcaaaatgcttgagaatatgttgcagtaataagtcagattcttgctcggcctgcaaaaggatctctttttcagtcaagctccgcttggcatctaaataacggtgggtttcgaccaaacgcgcacgaatccggctttttaactcagccgcagcagcacgggtgaatgttgttgcaatgacttggcccggtaaatatttctcaagaaaaatacgaaccattaaactcgacagtgtataggttttcccggtacccgccgaagcctcaattaaatgcagtccactaaattcaatatcaataataggttgataagacacctgtactcttgagttcatgccttactccgaatgttgaaattgaaaaaccggatgatacaggtcataggcaaactcatcacaagcatgttgaagtaatgcttgtgcatcttgttcttgcaaaatgaaacgccagtcttgatgtaacttgcacgcttcattttgtgtcatatcgatagaggtaaatgtccccgtttcattccagtattttaacagctctgcatagctcttctcatccagttttattttttctgtcggatttgttgtttcccactgatatgccttagctttttcaagtggctttaataataaagctgctggtaacacgagtggctgctgttgagcataacgccagattttaaaccacggttgtaaatactgccgagcttgctccgaactaatacctttacagatgacagtttggtcactaaaaaccacaatacggcgtctttcagttcctgcacttccttcatttaaataggccaaccaaagcaggtactctaaccagacttttgcacgtctttttgcccgagcacttgatgcttccatactgacccaatcctgagtttcagattttggcacagtaatattcatatgtagctgtttggcaattcgccacacacgctgagtcgtttgtgtcacggctggcgcgtaatgatgaaggcgctcaagcaaacattcctgttcaaaaatgccctgttgccatgcactgtattgaactttgcctacaggcaactgatcaagtagaacttcaggctgtgcctgctgttcgttttgctgtaaaaaatgtcgaatggtataacggcccaaaccatctaaaagcaaaggttcattctgatctaatacgcttacatttcctaagttttctacgcctaaagtttttaaatataaacgtgcggggaaagtcacatcctgtatccactgatggctgtctaaaaccaacatgtcaggtatttctaaaggataagatatatttgcccaaggcttaagaacaccggaagcttgctgaatttgcatcgccacgttaaaccagtgatcttgataacgaatatagcggttctcagccataaaacctttcgggtcaaacggctgtaaataatgtaagtgatagagctgttttaattgagtcgggatttcaataccttcaatcacttctcgatcgggtgcatttggttctggctttacaataagtgcaagatgctcacggaactcttgaagaatactagaaggatctctcacctcaccgtcattgacatcaaagccgttataaaacagccataagttttcttgagctaaaagtagggcatctaagaaagcgccttggtcatcctcaagacgggaacgatcacctaattgttgacgtaaggcatccatcaaatcaaatggcacatgggtgtctcgatttggaaactgccctgcatcaaggttcaacatcacaattaaacgataaggcaacggacgaatttgtccaatctgggcaaaggtaatctgtccagtcggttcagcttgagccgtttgattttctaaagttcgctgaatctcatccagaatataaggcaaaggcaaggtgattttacgtaaggtgcctgtttctgtctcggcatagtagcttgcgagcgttaacatacgctcttgtttttttacaatttcccgcgcagtttttaaagcagtcacaccggcctgctcaaactcgataatatcttgcgagagtgtttgcaaccagtattccaccgtatgacttttcttctgctcatgcataatgagccagtcacggcgttcatttaaatcttgataaatctgaatgagcgtaccaataagctcaaaatcgcccggttgaaccttagcgtaactcagcacctgattaaatgtagcatgttcgggaatggctatgccgagcgctaaccgctctaaagcaaatttaaagctatatcggtagtcatcatcgccgtcacataaactacgtttcagatgttctgcatcaagcccacgtttaaaccctgcatcagcaagtaaatttaaaattcgctctacttgagcatattcaagtgcataacgctgttgagtcgcgtgtaaaccaagccagtcagcaaactcatcaaagctaaatcgcccttgcataaggtgaatacgcccaatcacggcacgccatgcattaagtgcatcgagtgaggcaattcctgctattttgacaggcaaatgcacgccttgctcagtcgctgtagcaggaaaaacacttcgtattaaaggctctacttctgccaaattaggaactaaaaccaaaatatcatttggacgacgcggctgttcgtgcggttttgccaaccaaccaatcaattgttctttcaatacttcaagttgccgtaatgtcgagtggcagacatgaatctgaattgagtcatcgttaggggcaagctcatactgctttgcttggggttccaccaagtgcaaaatatctgactgaactttgccaagtaaactttcaggaaaatcatcgacaaaagcatccacccacttaccttcttcacctgtagacaagtttgagagtaatgagaagtggtcgcgggcttgtttgcccaatcttgttaacagcggatgtcttgactcacgcgcctcagcattaaaattaagcgtaaatttattaaagaaatcggcaatttccgcatcggtcgcttgggggttcttcgctataaaacgctcttttacccctaagtcatagcgctgtttccagagtgggtcgacactatcggcccaatattcttgcgaagggttatagtgcaaaatcaaaacatcgatgtattgccctaaacgacgtaaaaactgaagctggctgggtggtaaatccagtaaagtaaaaatgacaatttgctgcggcaaacgagacagtgctttcttctggcgctcaggatgttctaattcctgccagaataattcgtcaatttgctgcatttgcataaaatcttcatgaaaatgttgctgccataaccagcgctgccaacgttctaactcttgggtttgctgcaaagtaaatgccgaaacttctttatctttatgggcaatatacttttcgatatcgagtgatcgcccttgtccccatgctgctaaccagttatttggacaagtacacatattttcacaaccacgctggcactgtccccgatagaccatgtagttactaaataaatcggcaacctgctcagcaacccaatacaacattttttgcttttttagctgcttctcaataccttgttcaagccgatctgcgctgtcataaatacgttgaacaatagaatgcagtggatgagagctatctatgctcataacatcaggctgaataaattcctgtaaggcttgatgtacacgccatttaaaaatcaagcgtggaatattggctttacgaacctgttccttatgcgccgtgaggacctgttgataggcataccactgaaacccgcgcacacgttggtgaaactggtaattggcactcattccttgctgttctgcaagtttttgtatcagccattgctcgatagcaggacttggcacaatgaaatgctgggctttcaaaacctgtaatggatgcgttgacggctgggacgtagatgccagtacgccctgcaacaacacatcaatacgttgactttgaataacatggatacccatttatttcatatcctactcgcataatttatgcacaaaatcataaacattcattactatacaactgaatctgactatgtcacgttggtttaaacacagcataatctcattttaggtgtcacttaccttgtgttggcaaggcacctttaaggaacacattacaggtaaaacattatgaaaattgataacattcctgactatattgatcctagcctaaatctggaacaaattcgcgatgagtgccaagaactcattcagaaaagagcttacgtctctgctggtgcagcaattgtacccattcctttttttgacgtggtagtagatttgggaattttgtcacagcttattcccgatattaattcccgttttggtttagcgcctgaacatgtcagtgtctatgatccaaaaacaaaaacaattcactgggatgaattacgaaaacgcggctttcaattttcaggctttgtggttgctcgcactaccgttaaaaaaacctttaacggtttctttggaaaaattgttaccaaacaagtgacaaaatttgtaccactaggtgggcaacttgtcgcagcaagtttaggctattttatgatgaaaaaaatagcccaaactcatctaaatgacagctacaaccttgctaaacgtattcaacaaaaaagtcgtggcacggttgtaaactaaaatctaacttacggctgagagtttaatctgctctcagctgttttaaaatagctcttaacacttctaagcgtgcagtgtatttatcgtctgttgcgacaatataccaaggcgcatattcggtactagttcgctcaagcatatctgcggccgcctttaaataatcatcccacttatcacggttacgccaatcttcggcagtaattttaaagcgtttgtgcggtgtctcttctctggctttaaaacgttgctcttgctcatctttactaattgccagccaaatttttaccacaatcgtttggctatcaaataagtctttttcaaagcgattgatttcgtcatatgccctttgccactcgataggcgaagcaaatccttcaacacgctctaccagcacacgaccataccaggtacggtcaaaaatggtaattttttcagcttcattaatacgattccaaaaacgccacaaatacgggtgtcttgcttcgaaacgttcaggcgccccaatacagtgaatatcatattcacgcgggtctaagtttttaacaattcgcttgatggctccccctttacccgcagcgtccatcccttcaaatgcaatcaccacattgcgtttatcaaagcgcatgttatcggcaatttttttactcagtttatcgagctcttttttatattcggctttatccattttttcctgagcaggttttaataaactctcgggaatttttgcctgctgccatttacctttgacttcagtttcatgttcaggcagttgacgcatgtgttgtaaaagatactgagcaaaaaattgatcgcgctgtttttcatcttccccatcaataatgtaccaatcgtcggtaaagcgacggcgtaacttttgcaaagtgtcatattgttttttattacgccagtctaggccgtgaagcttatgccaatgctgttcagatggatctattttatctaaccgtttttggagtgatttccacgaaagatcaaaccagaccttaatgacatcgacatagttattttttaggtcctgttcaaacgctcgcatattttcaacataggcatcaaaacgcgcatcatccaaaggttctgacacatgagttgccgtaaccaacaaatcgctataccagttgccaaacatcaccacaatttggccttcagtcggaataaatgctgaataagactgccagaatgcttcagagtctgtcagcacacgtggtgcatctgcttttacccgtagatatcttggatctagccactctcgaagctgtttaacagcttccccttttccagctaactcaataccactcattaaaatgagtgtgcttttggcattgggtttccctcggctttcttttaaagcatattgtgcttcaattaaatcaactgaaagctgttcttcgtctcgtatttcaaattttggttgttgttcactcatggtccactgctctaatctttttatttaatttcgccattatttaacttatgcgcttgggtgatgaattgctatacaaattatgtcattgcaacatgatttaacctgaaaattgacgcataaatcattttttttacatctactcgccatagtagaaggttacaatgcctcttatgattttttgtaaatagcccaatattagagccttacatgtctaaactcgctgcttttgatgaacttttacaacaatataaaacatttaattatcacgacaatccagtgctagcccaacgtttgcaagatgtacaaacatggctaaaagaacggatgaaagagacgcatcacgacttttttaatttgccagaacacaaactgatggctcagtactttttaaaccgtttatatggtggaccagagttcgatgcacttgcagcacaaattgaacgtttattgaaatatgcacataaagcagaaaaggttttacctgaaaacgcaattaagacaggtacaaagtcggtaagtttggctgtacttgccactcaacttgatgaacaagtagcaatgcagcttcttgaagactatccggcagatactgtacttaccgacgagatcatgcgcttaaccttaatcaagcttgatcaggccgaagcccgttaccagcagcttgcccttcttgacgatttaggagcagcactcgataaatatatgcgttcatttatgatgtttactgcttttaaaatgtgtaaaggtattgcacaaaaatatcacttcgaattgatgtatgattttattcaagatggttttagcgcaatgaaacctttaaaatcggctgaggcctttattaaaacttttacggaaaaagaacgccagattgttgaaaaagtacattcaggacatccgaatccgtttagagtgtgataaggtcggcacatagaaaaaactcaacctcacgaagttgagattttattcattatatttgcatgatgatgcctgtaaaaatagacaaaatctgtcatcatgcagaacttattccgtttcacttgagtttgagtctaggagagacaatatgtctaacgaaaaccaaaagccaacatctccaactgagcaggcacaaagttcagacaaagttagcccattcctaagctcaccgttaccgcaaggtacccctcaagggcaacaacaatctttacagcaaaccttaacagatacaccagttagcggttctgtgccgaaatacaatttaccacgtggtgcaggcaacactggcaacgttggtgaaacaacacactttggttattcaacagttcgaactgaagataaagcacaaaaagttgctgaagttttccactcagttgcaagcaaatatgaccttatgaatgacttgatgtcatttggtattcaccgtttatggaaacgctttgcaattaacatgtctggtgttcgccgtggtcaacatgtgttagacattgctggtggtacaggcgacttagcaaaagtatttagccgtgaagttggcccgcagggtcatgtggtactttcagacattaacgaatctatgctcaatgttggccgtgatcgtctaattgatgcaggctgtaccaatgtcgattttgtacttgccaatgcagaaactttagaaccttttgcagacaacagctttgaccttgtaaccattagctttggtttacgcaacgtgacagataaagacgcagcgcttgcttctatgttccgtgtgttaaaaccaggtggccgcttacttgttcttgagttttctaaaccagtatttgagccattctcaaaactttatgacctttactcattcactgctttaccgattatgggtaaattggttgccaatgactcagaaagttataagtacttggctgaatcaattcgtatgcacccagaccaacgtaccttaaaaggtatgatggaaaatgctggcttccagaactgtgattatcacaacctgactggcggtattgttgctgttcatcgcggttttaaactgtaagggataacgatatgtggtcgattctggcactcggtgcagtcgaacgtatcattcatcatctgatcgatctggatgcattaacccgcattcagctcaatcagctacagggcaaaatgttgcgtgttatcatcgatagcccgcaactttctgttgatgtattctttgaccaagaaaaagtacgtcttgaacctaccgttacagggcacagtgaaaagccatctatttttgagcagcgcccttttgatccacaatttaaaatttctgaagccactgcaactttgcatgtcaaagatgtcgttgaactgatcaaattattattaagcgatccagaccaaattggtaatatcccgcttcaaggtgattatcacctcttacaggatattcaaaaaattatgcagcaagctgaacctgatttagctgcgcatctatcaaaatgggttggtcctcaactcgctcacgaaatcggtaagatccaacttgcaccaaaacatttaaaacgctctcttcaaagtcatctattttttgctgaagatgccttaaaagaagacagtggtttatttgccccacgttgggaaatggacgatttaaatcaggctacgcgtaagcttaatcaagacattgatcgtctagaagctaaattgcagcagctcaatgcacaactacaacccactcaagactaggtaagactttatatgattccgcacgtttcacgtttactcgaactttggcgtattgcagcgcactatagactcgatacgttgttccctgcggatgaattacctgttaaagctaagcatgcattgaacattataaaaatgcatccggcagcatggtctagtcgtgaacgcaaaaatcctttaaagcttaaagaagctttagaagatatggggccgcttgcaattaagcttggacaactcctgtcaacccgccgtgatttgattccacctgaaatactcgcccaactggttttgcttcaagatcaggtcaaaccttttgatggagaagttgccaaacaacgtattcaagattctttaaaagcagacgtaaatacactgttcgcccgctttgatgatcaaccacttgcagcagcctcaattgcacaagtccatacagcggcgttacatgatggacgtgaagttgttgttaaagttactcgtccagacattcgtagccaaattttacaagactttgaaattctggcttggctaggtaacaccttagaaagtcgtcttgaagctgcccgtgcattacatttatctgaaattattcaagactaccgccaaatcattttaaatgagctggacttgagtattgaggcagataacacccgtcgtatgcgccattacttcactggttcaaccatgatgtatgtgccagaagtctacatggacaccaaagatgtcatggtggctgagcgtattactggtgtccctatttcagatacggcaacctttgaccgtttaggtatggaccgcgcacaacttgcagaaaaagggttaaccattttctttacgcaagtattccgcgataactttttccatgccgacatgcaccccggcaatgtctttgtagaaaccatcaacccaagcaatccacgctttattgcactggactgtgcaattatgggtgagctttctaagcacgaccaaatgacagttgcccgtatgttgcttgctgtcatgaacagcaactttatgcagcttattcaaattgtgcatcaagctggctggattccaccgggtacagatcaagacgcgttagcacgtgaaatgcgccgcactgttggaccaatggtgtctaagccaatggaccagcttgattttgcgggtatcttaattcaagtgatggatattgcccgtcgcttccatttagaaatcccgccacagctcatgctactactcaaaactttagtgcatgtagaaggcctaggtacggacctttatccgcagctcgacatctggaaattggcaaaaccaattttgacagaatgggtcaaatccaatatgaacccagtcaaaaatgtaaaagagcttggtcagcaattacctgatctgcttttaggcgctcaagatttcccaagtttaattattgatagcttaaatggtttaaaaaatcagtctgcttggcaagaccgtcagttacgtgaaattcaacagcttcgtttacaaatggaacaccaacaacgtcgtagctggatgtttggcagtactatgttgattttgctaactattgcgattattagcccttggtttgtatctattattttgattgtgttgagcagcttattggcgctttggcgtgtattgaaataacttccaagtcccttgcccatgcaagggatttttttatgggtaaaacttataatttaaaaaaatatagatcgattatccgttcattgctaaatttagttttatgaatgcttgaaaagaacaaacaatgaaaacacctcattttgccattattggtgcaggcacggcaggtttagccactgcgattttgctcgcccgtgaaggcaaccacgttactatttttgaacaagttgatgagttatctccggtaggtgcaggtttactgctacaacctgcgggcttagccgtatttgagcacttaggtgtgctcgacaaagccctaaccttaggtgcgaaagtcacaggcttagaaggacaacttccagacaagcgtcttttagttaacagtcactatcgcgaagcatcaacaaatctttatggtctaggtatacaccgagccactttgtgtcacgttctcactcaaaaacttaacgagtattcaagccagattacttggtatatgaaccattctgttgaaagatttgaagaacataacgatgaagttcagatatttggcagtcatcaaaatcaaaagtttgatgcttgctttgatggcctactcattgccaatggtgctcgtagtcaattaagacctaaagcatgggtaaaggttaacaaagcttatccttggggggctgcgtggagtatcgtgcccgagtgccaagtcctcgatcctgaaattctgcatcaattttatgatcgctcgaaaattatgatgggaattcttcctacgggagcgattccaaccgaacctcaacagcgcctttcaagtgttttttggagcttaccaaccccacaattacaaagctttttgcaagatgagcaggctaaacaagcttggttaaagcaagtctcagaacgttggcccaaagttgcagagtggctcaaagaaattttgtataactgtcaaactcagcccaaatggctatctgcaaactatcgtgatgtcgtcatgactcaatttggtcaaggtcgaattggggtaattggagatgcagctcatgcgatgagcccacagttgggacaaggggccaatatggcattattagatgcttgggctttttctcaatcattgcgacaagctcaaaaaaaccagaatattgattggcccctactctggcagcattatcaccagtttcgcggttcatctacccagttttatcaatttcttagccgcttactaacaccactttatcaatctgaccattggtgggcgggaggtttaagagatttagttttcccttggatgtatcaaattccttattttcgaaaagaaatggccatcacaatttcaggcttaaagacagggccattccgccatcttgaatatgatcaagtagctcaattacctaaagaaagcagtacgtttcatttaaaaagtgaatctctggctgatttttaaaagtagctgagtacaagctgctcattacgctaggagagtcaaaaaggacaaagaatttttccgcaaagtggcgttgatgccgtacactatacaagctatttttagcatctgactgaaatcaatttatagttcatatttctttggtgattcctcatgaataacacgcaatggctcgatgaagtaaaatttaacgaacaaggtcttatccctgccattgctcaacatcatcaaaccggacgtattttgatggtggcgtggatgaaccgtgaatcacttgcactcaccgcagaaaaaaatcaggctgtgtatttctctcgctctcgccaaaaactttggcacaagggtgaagaatcaggtcatttccaaacggtttatgaaattcgtctggactgcgatggcgacgtgattgtattacaggttgagcaacatggcggtatcgcatgtcatacaggtcgtgagtcttgtttctaccgtaaactcaccccacagggctgggaaattgtcgatgcacagttaaaagaccctactgcaatttatggcgacaaagccaaagctgaaagccacgatcatgctcatactactgaacaagtggatgtacttgctcacttagggcaattgatgcaagagcgtaagcaagcagaagcagacacttcatatgttgcaagcctctacaaaaaaggcatcaataaaattttagaaaaagtcggcgaagaaggcgtagaaaccattattgctgcgaaagactacgctgctcaaaatacagaaagtaatttaaatgacttgatttatgaaactgccgatttgtggttccatagtattgtcatgttgggttatttcgatcttaatccacaacttattattgacgagttaggtcgtcgtcagggtttatctggtttagttgaaaaagctaaccgcaataaggtttaaaatcactcagtgtcgaatatcgaaaaacctaaagccacctatgagcaagcaattgccatagataacgcacgtcttgggcaatcatttaaagtgattgcctatgcgggcacaggtaaaactactacattacaaatgattagtgatgccatgcctgaacggcgtggtatgtatttggcttttaacaaagccattgctggtgaagctcaaaacaaatttcatcgcaatgtagactgccgtacttttcactcactcgcctttcgcagtgtgccacgtggcgtaactgataaattacgtttaccccgcttaagcccaagctttattgcaaaagaatatcggctagaaccgattaccttacggcgcatgatgggtggacgttatgaaaaatacgtcttaatgccaagtcgcctagcgagtcttgtcgccaatgcggtgagctatttctgttcaaccagttctcaatatccagcgcctcgacatattcaggcgccaaactggttacatccagacgatattactgcacttcaaacccatctttaccctgctgttgaacgccgctggctagagtccatcgatccaaaccatcaagccggaattggtcacgatatttacctcaaactttgggcattgtctgagcctaatattccggccgattatgtcttatttgatgaagcacaagatgctgaccctttaatgctgggtatattacttcgtcaaaaaagtacgcaggttatttatgtaggcgatgcacatcagcaaatctacgcgtggcgcggtgcagtaaatgccatgcaacaattgcctttgccagagtctcgcctaacgacctcttttcgttttggagaggcgattgccgatgtcgccaatgcgttgttaggtggcttaaatgagacagttcctttgcttggtaatccgaaccagaaatcaagtgtagtcaataaacctcatacaaaaatgcgtgatgcgattttgtgtcgtaccaatgctcgcgcaatggagctgttattggcaggcttagttcacggcgataaagtgagtttgcaagctgaccatcaaaaactaaaccgttttgtagatgctgcaagcctcttaaagcaagggaaacgagttactgacgttcctgagttggcatggtttaactcatggcatgatgttcatgagtactgcgaaaccaatgaaggaagcgatataaaaccattggttaagctggtagatgatcacggcactgacccattaaaaaaagcacttgcaaagattactccccttgagcaagctgactatgtcatctcgactgcccataaagcgaaagggctggaatggaaccgtgtccatattgaagacgactatcaatttaaaattaatggtttagagcataagattacagatgaagagttaagattactgtacgtggcctgtactcgtgctaaagtaagtctaaatatccatcatctttatgatctgatacaacaattaaaactaagggcgcctttaagtcttcgtcagtcggttggttgaagcgctcataattaggtgagcctatgaaacttgaatctatccaatttaaacatattgctctgtttcatgacctaaaaatacagttccaatatgacaaacaaccgattactttaattttaggcgagcaggcgactggcaaaagtatgctactcaagcatatttatcatgctttaacatggtttcctgcgcgccttaaagatgcacgtacaccaggcattgtcatgccagatcaggacattagccattctcgtttgcaatctaaaatagaagtcagcatccagattccaccggaatttggacaactccctgaaaccgcttcaacccagcaaaccgacacatccctttgtagctggaagctgttcaagaccttaaattcaagtggtgtagggattagtcaagttgaaactcagcagctcgatcaaaccattaccctttatcatcaagtcacaagaaaagacccacttcaaggtcttcccttactcgcttattatccgtcagagcgatttgttaacgatataaatttactgaataaaaatttaccgggtattacccagtctatttctgcttatgacattagcttcattccgtttaccaccttcgcccgcttttttgagtggttacgtgaaattagcgatattgaaaatgcacaagcggctcatgttgtgcagcgaattatttcaaaacaatccaattcacaagatcaggaagaaattttacgtcagctacaacttgaattggcaggacatcctaaacagcttccttcacctaatttgtacgcattaaaatcgacattaaagattatttttcctgagcttgaagacttttatttgcaatatcacccaaaacttcaacttatggcacattacaagggtgaagtcttggcctttcaacaactttccaataccactaaaacatggattgcactcgtaggcgatgtggttcgcaggctttgtttgctcaatccgttgagcttagacccttgtcttgaaggtgaaggcgttttgttaattgaccagatcgattcacaactagatgcagcacattgctcagaaattttaaatcgtcttcatcgcgcattcccacgcttacaaattattgtgaccggaagccgtgaagaattgcttgaacatgcagccgtatatcaatgttttaaattagagcatggaaaaatcagtccacttgatttaagtacgactcagcagcaactcgaacatctttatacgttattacaacgagatgaagcgttaacgccgcatatagatcccctaccgcttgataccgagccagcaacaactcaaattgatagtttgtaccaacaaatccaaaatctaaatgaacagcaaaaaaatgaattattacgtatgattcatgcaggagacacctcggaagaaacctcctctctttaaaatttattatccatttcgctcaatttttataataaaaccgaattcgctaaatatatgatgaaatctggttttttgagctggaaaatcactagatgttgttaccacatgtaataacatcagatttttaatgattttttagtgtacaataaatttcattttgcgtttttattattcaagttgcgcaatacaacttgtttctcgctttatttttctaatttggtcgggttttcagaatataagctttggaaatctctttgaattcctatctattctgaaatgaaaatttcacctttaggcttcggtctaaattatatatggatacgagtgtgctaccgataattatcttattaccgttaatattaggcaccacccttgtttcattgcttcaacggttttcacgtggagtaacggctttaggggcgatcggagtcagtttaaccagttttggtttattactgactcaggctaaaactgtgcttggtggtgcaagcattcaacaaagttgggattggttaccacaattaggaattaatctgagctttagacttgatgcccttggtttattattttctcttcttattaccggtatcggtacactcatttatatttatgcctattattatctaggccctaaaaattcattaagtaaattatatttattactcatgctgtttatggcagcaatgctcggtatttctctttctaacaatttaattattttattagtcttttgggaacttaccagtatttcatccttcctattagtcggttactggagccattacgaagctgctcaacgtggctcgcgtatggcacttaccattacaggtatgggtggactcgccatgctaggtgggtttgtcttattaggacaaatcacaggaacctacgaaattaatgatattgtcggaatgaaagacctcattcaaagtcactatctgtttgttccgacgcttttgcttattttactgggtgcatttactaaaagtgctcagttcccgttccatttttggttacccaatgcaatggcagcgcccactcccgtgtcggcctatttgcactctgccaccatggtaaaagctgggattttcttattagctcgtcttgcacctattttcattggcgctgcgctttatcacaacattgtcacgtttgtcggcctatttacactttgtatggccgcatgcttcgcaatttttaaagaagatctaaaagggctactagcctattctacaattagtcatttaggtcttatcgtttgcctgcttggtattggttcacctttagctgttgctgcggcaattttccatattattaaccacgccacctttaaagctgccctgtttatgattgccgggatcattgaccatgaaacaggtacacgtgaccttagaaagttaagtgggatttggcaactattaccgtttaccgcaacactgactatgattacagcggcatccatggcaggtgttcctctcactaatggctttatttctaaagaaatgttctttaccgagctattagcgagcctttcaggatcaactgttatctttgccagtattattgcgacgcttgccggtatttttgcagtcagttattcaattcgcttagtacacggcgtattttttgatggccccgtaggtaaacaagttccaaataaaaatgcccacgagccacctatcggcatgcgagcaccagctatattgcttgcgacactatgtattttggtcggtattttccctgccctactggtcgagcctctagttaacagtgtaacacgtgcaagtcttatgcaacctgattttgcaggtactcatcttgcaatttggcatggatttaatgcgccattaatcatgagtattattgctctggttggcggtacgcttttctattttgccctagcaaaagatggcatgattcgtaagatcgaccttgacccacgtttagggcgcttacaaggccgtattttatttgacttattcttaaagcatttattattaacaagccgaaaaattaaacaaaaaaccgaaaatggttctttgcaaagttacctgttcttaatcattgcttttagcatcgtcatggttactctgcctttgttcaatcagggccttaccacaggtacacgtgagctgactcacgcaccatggattgcagtagttctttggctgaccttattctcaggttgctggatgatgctttggttccaccacgaacgtatcaaggctgtactcattagtggtgcaattggtcttgtggttaccatggtatttgtcaccatgtcggcacctgacttagcactcactcaaattacggtagatgtagttacgactgttctgttgttgatgagcttatcgttactccctcaacttacgccatatgaatctcgtcgctcaagacgttggagagatgctgcgttagcaattattggcggtttaggaattggttggattacatggcttattttaacgcgtgatcataattcgatttcatggttctttgctcagcaatccttaccacttggcggcggttcaaacattgtaaatgttattttggtggacttccgtggctttgatacctttggtgaaattacagtactaggcattgctgcgattggtgcgctatgtctcatggatggcatgcgcgtacatggcaccaccatgacccaaggcctcacctaccgttttaacccatctccactcatgttccgtattacggcctcttgggtgttacctttagcattggtcgtaagtgtctatatctttatgcgtggacacaactacccgggtggtggctttattgcaggtctaattacctcaatggcactgattattcagtacattgctttaggtcaagatcaagcagaacaaatgttaaaagcccaatccggtcgtctttacgaaatctggattggctccggattaacaattgcaggccttactggcattgccgcatggttctgggcacgtccattcttaaccagtgcgcacgtctatgttgaattaccagttttaggtaagttgcatctggcttcagcagcaagctttgatctgggtgtgtatatcaccgtagtaggcgctaccatgctactcatttctgtattaggggactctcgccactcgagtatgtctggtcctgtacctcatggggagaaatcatcatgatcagtttagaattcttactggccactgccattgggctacttgttgcgacaggcatttatctaattttacgtgcgcgtaccttccctgttgtgttgggcttagcagtgctgggctatgcggttaacttatttttgtttgcgatgggtcgtttgcaagtcagctcaccagccatcctaaccgaaaccaccaatattacagatccacttccacaagcacttgttttaacagcaatcgtgatcggttttgccactaccgcttttattgtgcaactcgcattacgtagccgttatgaatccggtagtgaccatgttgatgccaaagaagatatttctccaacatacgacccacgtgaggatgagccgtgatgtttgattttttatctttttggcaagctaatacaccaattttcagtatcctcatcccggcatttactggttttatcttattgcttctaggcaaccctggcgctggtgcattaaaagaagattggcgacaaccttggcgccgtggcattagtttgatctcagcaatagctgggttaatcactgctgttagttatctgcttgttgcaaacactggccaaattacggtttatcagttgagcgagtggtcagctccctttggtattgtgctggtactcgaccgcctttcagcttttatgctggttttaacttatgccttagcagttccggttttatggtatgccagtgaaaactgggatacgagaggtcgctatttccacgccatattccattttcttttaatggggctatgtggtgcatttctcacaggcgacttatttaacctgttcgttttctttgaaatcttgctcatggcgtcctatgtcctcttattacatggacaaggaaaaccgagatttcagcttggtgtacactacgtcattatcaaccttttagcctctgccctgttcttaattggtcttggcatgatctatggcagtgtaggtagcctcaatatggctgacgtttcacgtttgctaccgactttagatgcagatcaacataaattagcagttgcaggtgccttactcttatttgtcgtgtttggtattaaagcggccatgctaccagttggtttttggctaccaaaaacttatgccgttgcaagtacacctgtcgcagcaatttttaccatcatgaccaaagtggggatctatgccattttgcgtgtcaatggaactgtatttaatgatgtactcagccaagaaatttttaaaagctggttgcttccaattggtttagtgacttctttatatggcgtgattggcgcaattggtgcagatcgcctcagacgttttgttggctttatggtgctgtcttcaattggtactttattgattgcaattgccatgtcaaacacgcaagcgtggtctggagcattattctatttagtccacagtacattgattggtgcagcattttacctgttctgtggctggatgacttcacagcgcggtgattttaaagaccatttaaagattgcaccgagaattaaacaagaaaaagcagccatgctgacttatttcctgattgccatgatgctcgcaggcttaccaccttttagtggcttctttgggaaagtatttattttgcaggctactgttgaaactgcatatcaaggctgggttattggtattgttcttttggtgagtttattaagcattattgcattaacacgtgtcggctttattttattctggcgtgcatcaccaccagaagaagacccgatcaatcctgcttatattatttatcgtgctttacctgaaaaagcaccgccacgtaacgataccgtcatctatatcttacttgccggtttagtggcttatgtagcatttgcttcacctgtattgcactacaccacaaataccgctcagcaaattcaagatcatgccctgtatcagcaatctattcttaaaactgatcaaaatggcgaagttattagtgttcagccatatgactcaacttatttaccagaaacaaaatatggtggtgaagttgaagatcataatgcctatcttattcctgacattatttcgaaagatactttcaacggtgagcatatttctgaatataaacaccgccaaattcagcagcaagaaaaattgcaaaccccaaccattgctgatgaaagtcaactgaaacctatggagccataacaatgcagctatctaaattgcttgaccgctggtttccgcatccatttgtttcttttttgattatcatcttctggttaatgctcgcgcatagtcttgatgcgagcgacctgcttatggctgtaattttggggcttgttattcctcgtctagttcgtccttttattaccagaaccccgcatatccattggaaacctgccataaaactgtgttttgttgtcttgtgggatattattgtttccaattttcgggttgctaaactggtattagggtcaccgaaaaaattacatcctaaatggtaccgtgttccattagaaacagaacatgaacaagtaaactctttactggcaatgattattaccacaacgcctggcacggtctctgccggtattgatcaagagcgtggtgatattttggtccactctcttagcacagaaaatactgaaagtgatgtgcaagacatcaaacaacgctatgaggctccactcatggaaatttttgatgtgaaaagcaaatcggaggacaacgcatgaccatcctaccttatgctcttggcattagcttggttgctatcacaatctctatgttgctttgcttatttcgaatggtgatgggaccatctattgtcgaccgcctactagcgcttgatacactatttttaaatgcgacctgtctcattattgtgttaggcatttattggacaaccacctctttattcgaaggggcgttgttagtcgctatgctagggtttgtttcaacggctgctttagctcgttattttacaaccggtcatgtaatcgattaggggaaggtcaaaatgcaaattacaatggaaattattgtttcgatctttctggttttcggtgctttttttatgttagtcggatctatcggtatggtacgtctacccgatttattcatgcgactacatgcacctaccaagtcgagtacattaggcttaggtagctttttaattgcttcaatgatcttttttgcttttcaaggccgatttggctttgccgagttacttattacactgttggcttttattactgcacctgtatcagccaacttaattgctcaagccgcgctacatttacgtttacgctcattgagtggtgaagttcctgaagctattgaacgtcctctaccgtgggatcgttataaaattgggcaacgtttttcacaaaacaaaccacccatggaaccgcctcaagaataaaaacttgaacacataaaaaagccaccccaaggtggcttttttattttgagtttttattactctttgtcatctgactcacgtttcggtaaatcttgtaccgctttttcgataagaccaaacatatagttaccatatgcattggttttatcgtaatggaaacgcaagcgaggcgtgatgcgcgttttaatacgacgactcaactcctgacgtaaaaaaccagatgctttattcaaaatatctagtgtttcacggtgagccacttcgttttggtcatcgcttaattcacgacccatcacggtcacatagacatcggcataacctaagtccggactgactttaacgcctgagatggtcacaagaccacccagacgcggatctttcaactcctgacggataagttcagaaagctcgcgctgtactgaatccgccattcgctttaagcgttgtccacccgccattaaagactccgtttaaccatttgaacatcataaacctcaatcttatcaagaggtttgatgtcgttataacctttcacggcaagaccacattccataccggcacgaacttcatcaacgacatctttataacgacgtaatgattcaagttcaccttggaaaatcacaacatcatcacgtaagacacggattggtttgttacggtgaatcacgccttccataaccatacagcccgcagcagcaccaaacttactagaacggaacacttcacgtacttgagcaacacccaagatagtttcacggtgttcaggagcaagtttaccgctcatggcatcttttacatcatcaatcaattcatagatgatgctgtagtaacgaatatcgataccgtcttggtcactcttctgacgagcagctgtatcagcacgaacgttgaagcctaacaatacagcttctgaagactctgcaagaattacatcagactcagtgatcgcaccaacaccagaactaattacgcgaacttttacttcatcagtagagagttcatgtaatgcagcattcaatgcttctaaagtaccacgaacatctgttcttaaaacaacattcactgtaggaacgtcttttttgcccatagatgccatgatgttttcaagacgcattgcgctttgacgttcgatacgtttttcacgttcacggtctgcacgagcatcagcaacttcacgtgccttcttctcgtcatttactacaagaacttcatcacccgccattggagcttctggtagacccaaaatttccactggaatagatggtcctgctgacttaatcggcttaccgttttcatcagacatcgcacgaacacggccatatgatgaaccagcaagaacaaggtcaccaatatttaatgtaccgttttgaacaagaatcgaagttactgcaccacggcctttatccacacgtgcttcaataacaacaccttgtgcagcaccttcagcagatgcttttaattccatcaattcagattgaatcagaattaaatcaaggagttcatcaataccttggccagtatgtgctgaaaccttagcaaccggaacatcaccgccccattcttctggaacgatttctttggttgttaattcatttaacacacggtctggatcagcagattctttatccattttgttgatagcaacaataattggagttcctgctgcacgtgcatggtcaatcgcttctgcagtttgcggcattacaccgtcatctgctgcaacaaccaataccacgatatccgttgctttagcaccacgtgcacgcattgaggtaaatgctgcgtgtcccggtgtatcaaggaatgtaataatccctttgtctgtttcaacgtgatatgcaccaatgtgctgggtaataccacctgcttcacctgccgccactttagaacgacggatacggtcaagcaatgatgttttaccatggtcaacgtgacccatgattgtaacaactggaggacgagtagtttgttcaccacgtgcttcttcagctgcttcaagtaagttatcttctgcttgtgtatcagaaactagaacagggttatgacccatttcttctacaacaagtgcagctgtatcttggtcaattgtctggttctggttaaccaattcacccattttcataagtgtcttgataacttcacgtactttaatcgccatcttctgagcaagatcggcaacaacaatgcttgaaccgatttctacatcatagacttgctttttaactggcttttcaaaaccatgcttgttcgcttggcttgattttaaaccacgtttgttatggttaacgaagctttgctcttcttgaccacgacgaccgcctttcttaccagcgcgagggttagttgtagcaccaccacgtttaatttcacggtcttcttgattaaatgaatcttcataagcttggccaacaagacctgaagcaagaggagaatcatcaatcacacgaatagttgcagtagcatcatcatttgaatatttagatgccatcttacgcatttgttcaagcgtacgctgctgagcttcctcagccgctttacgacgtgcagcttcttcagttgctttcaactgagctgtttgtgcttcacgcgctttcttttgctctaatgtttctgctggttttggtgcaggttttactgtaccaccaccacgttttttcactacaacagcagctttaggagctgactgtgcagcgctatcttgttgatgagcagcacgcattgcatctaaagttgcttttgctttttgctctgtttgaagacgcgctttttgctctgcagcttcacgcgcttgttgttctgcacgcgctttagcttccgcttctgcacgcgctttagcttctgctgcaatttgttctgggtttggtttagcaaaaacctgttttttacgtacttctacgttaatagtttttgctttacccgaagtacttgcaactttagcggtactggttgttttacgtttcaacgcaatttttcctgtgttaccactttcctgaccatgcacctttttcaaataattgactaaagtgtcctgttgttcagtggtaataatgtcgtctgctgtacgttgaggcaaacctgcttcacgagcctgttctaggagcttctcaacaggacgtcctacgctgagagctaactctttaatcgacttgtccgtcatatttcatctcctagttaaaccatgattcgcgagctttcatgatcaattgacctgctttatcatgaccaagaccttcaatatcagaaatatcgtcagttgcttgatctgccaaatcatcaacagtaataataccgcgagcggctagcgagtaagcgatctcagaggtcatgccttccatattgagaaggtctgcactcggttcttgaatattttcttgctgtttcaatgcatcagttaatgcagcttcttttgcacgactttgcaataactcaactaactcagcgtcaagttcaatttcgtcaaaagtttcagctggcacataagcaatctcttctaaagaagtgaagcccatctctactaacgccattgccaagtcttcttcaatatctaaacgtgacacgaacatgtcgagatattgctgagcttcattctgctgacgagcacgatactcttcttcaagcatcatgtcgagtttgtagccagttaaatcagaagctaaacgaacattttgaccttgcgaaccaatcgcacgtgccaattgatcgttggtagcaaaaataatgtctgcactttttgcatcttcatcaagcacaatgcctgatacatcagctggttctaatgcacttgcgatgtattgagctggatcatcagaccaaactacaacatcaatacgctcaccatttaactcttgctgtaccgcttggatacgtgttccacgcataccaatacatgcaccaacagggtcaatacggtggtcgttcgtttttactgcgattttcgcacgaacacctggttgacgcgccgcagctttaatttcaataatttcttcagaaatttcaggaatttctttcttcatcaaagcaataagcatttcaggcttagcgcgtgataatagaagctgagcaccacggccttcacggtttacactatataaaatagcatttacacgttgttttggacgaagaatctctttaggaatcatttcttcacgagctaaataagcttcagcattgtcacctaagtcaatgatgaaaccatctttagtttgctttttcacttcaccgtaaattagctcgccaacttttgattcataagcatcagcaactaatgcacgctctgcttcacgaattttttgtacgataacctgtttcgcaatctgtgcagcgatacgaccgaactcaatcgattctacttcaagctcacgaacgtcgccaattgaccattttgcaggatcaacatcagaaattgcgtcttggcatgctggcatttcatgatcttcatctgccacaacagtccattgacggaatgtacggtaatcaccagttctacgatcaatttctacacgaagctgagcttcttcagaattggtaccctcgtaaaattttttcttcgttgcagcaactagagcttgttctaaagcttcgaagatcgcttcacgactaacacctttttcattactaaccgtttcaacaacggtaagaatttcgcggcccataagtcacctaccgatttcttatataatttaaataaatttaatcttgatagatcaagtttgctttatcgatattgttgctgtcgatatcaagcacatgctttccttcaacttcaacctgaatctcttcattttcaaggtctacagcaaggagttttgcttgaaatttacgacgattttctactgcagcaatcaaacgcaaagcaacctgttgtccaatgtagccttgcaactgttcgagttgaaaaaatgggcgatcccagcctggtgaagaaacttctaatgcatattcacctgaaatcggatcatggacatccagcattgcgccgacctgttgtgtaacacgaacacaatcttctacaccaataccgcggccttgctctacttcaccatcttcattaatcactggttcagcgttttcatcaaccggtctatcgatataaatacgcaataatgaacgcttaccttgtggaaggaattcaattccccaaaggtcgacaccacatgcctccactgctggagcaatcatgtcatacaatgcttgggatttatttgataatttcatttactctcgtcattctcgtgcgattcaatcggttgttttaaccgacacagacttactatagtgaagcatgactatttgaccaattgatgtcgacactacacgatagcgatacgataaccaataaaaaagggcgttaatcgcccctatatagcacagaaaacaatagtccactgtgcaaaaaggcccaccttgtctgtgagcctctttaagaaacttggtagcgggagctggatttgaaccaacgaccttcgggttatgagcccgacgagctaccagactgctccatcccgcatcaacgtgcaaaaattatatacaaatatcgaaaaaagtcaatgtaaacttatccaatattagcttgattaagttgcaccttaatcaaattggtagcgggagctggatttgaaccaacgaccttcgggttatgagcccgacgagctaccagactgctccatcccgcatcaaaaacaaaactgcttgcactcaactttctggttcaaagttggtgcggaaggggggacttgaacccccacgcccgaaagcactaccacctcaaggtagcgtgtctaccaattccaccaccaccgcagcttgtgggacgcattctagtcctttcaattccaaaaggaaagtcttatttccaattattggccagtttttggtgcatttggtgaagtttcaggcgatgtagtctgcactggcacagtcgtttgtacagttttcaaactatatgcttcagtcgtttgcttcttggcaaaaacagccagagtcaaactggtcacaaagaataaagctgtcaaaattgcagtcacgcgagtcaagaagttacctgaaccagacgcaccaaatactgttgctgcgccacctccaccaaaagaggcacctgcatctgcgcctttaccatgttgcactaaaattaatgcaatcatcagtactgctaaaataatatgtacaacaagtacaaaagagtgcataccctatcctcgttatttgctttgcgcgaaggcttgtacaatttgataaaaagatgctgcatttaatgaagcaccacccaccaacgcaccattgatatctggacatgcagctaactcaacagcattttcagcttttacactaccgccatataaaatagcaatatttgagcctgctggtgtaagttggcataagccttcacgaattttagcgtgcatcgcttgcgcatcttgcggagaagctgttttacctgtaccaattgcccaaataggttcataggcaataaccacttggttttgccattgttctgcagtaactacaggtgcaatatcacaaatttgctgtagaacaacttgctcggcctgaccttgctcacgttgttcaaggctttcgcccacacaataaatgacagtcatacccgcatttaatgcattttggagttttgccttcaaaatttcaacgttgtcaccaaaaatatcacgacgttcagagtgtcctacaagtacgaaattaatttggctatcttttaatagttctgcactgacttcaccagtataagcacctgtaccagcaacacgtgatacatcctgtgcaaccgtatataccgttcttgcagcatcctgtaattgcgcttgtaccgttgtaagagcaatagaaacaggggcaacgcccacatggcagttttcatctgcaatttggttttgttgcaataattgtttaaattcttctataagttggttggcgttggcacgcattggattcattttccagttaccaactacccaaggcgtaatcgtcgaacccgacatactgctcacctttcatcaaaaatgcagcacattctacacgcatttatacaaatttcagatacttttctttaacgtgattactcatatcttttctagtgtttgaaattaagaaaaaaactttactttattaaaagtccgacattctaaaaattaataaagaaaaacttcgactggttcaagctttaataggctgagtaggacccgagcaacactttctaaggtagtaattttacataacaaaagtataatttttcatataccaattataaacacattaacataggcaggcagatgtcagcattacatacatctccaaaatttacggggttttttcgacgtttagtcgaagaaaagcatgtgtcggcagcgaccatgcaaactgcattagatgcagcgaaaagagctaagcaggacacagtcgcatatttaattgaagaggttcatctctccccttcgttattggctgaaacaatttctgctgagtttgctgaaccatatttcgatctggatgtttatgacacctctcagattcctaaagatctggtcgatcagaaactgattttaaaacatcgaattttgccgctcattcaaagagggcaaattttatatgttgcgaccagtaatccaagcaatatcgaagcgattgatgcaattcgttttaatagtaaattgctggttgagcctgtaattgtggagcaccataaactcgaaaaagttttaggccagcattttgcagaagaaagcagctttgacttcaatgatgaagagtttgatctcgatgttaatcttgatggtcctaccactcaagaagatgaagaagaagctcctcaaggcgatgaagccccgattgttaaatatattaataagttattaattgatgccattcgtatgggtgcttcagacttacattttgaaccgtacgaaaaatcctatcgggtgcgctatcgtgtcgatggcatgttacgtcaaattgccaatccccctctacagcttgcaaaccgcttggcatcacgcttaaaagtaatgtctcaaatggacatttctgaaaaacgcgtcccacaagatggtcgtatcaagctcaagctgtcaaaaagcaaagcgattgattttcgtgtgaactccctcccgactttgtttggtgaaaagttagttctacgtattcttgacccatcaagcgcaatgctaggaattgatgcactaggatatgaagaagatcaaaaagctttgtttatggaggcattagataaacctcaaggcatgcttttaattaccggaccaacaggttctggtaaaaccgtatcgttatatacaggtttaaatattttaaatactgaaagctccaatatttctactgccgaagacccggtagaaattaatcttgaagggattaatcaagttaacgtaaaccccaaggtagggcttacttttgcggccgcacttaaatcatttttacgacaagaccctgacattattatggtgggtgagattcgtgacttggaaacagcagaaattgcaattaaggcggctcaaaccggccacatggtgatgtcaacactacataccaatagtgctccggaaacattgacccgtctacgcaatatgggagttccttcttttaatattgcaacatcagtaaacctagttattgcacagcgtttagcacgtcgtctttgttctcaatgcaaaatacctgctgatattcctaaacaaagcttattagaaatgggctttaccgaacaagatttagcgcacccagattttcgggtttttcagcccgtaggttgccctgaatgtcgtgaaggctataaaggccgtgtcggtatttatgaggtaatgaaagttacacctgaaatttccaagattattatggaagatggcaacgctttagaaatcgcagctgcttctgaaaaattggggtttaataatctacgtcgttcaggtttaaaaaaggtgatgcaaggggtgacctctttacaagaagtcaaccgtgtcaccagtgaataagacactatttaaaaaataaggataatctaatggctgtcaaaaaggcacaaatgatgccgacttttgcttatgaaggggttgaccgtaagggcgtaaaaatcaagggagaacttccggctaaaaacatggctttagccaaagtgaccttacgcaaacaaggggtgactgttcgaaatatacgtgaaaaacgtaaaaatattcttgaaggtttattcaagaaaaaagtcaccacactcgatattacgatttttactcgacaattggcgaccatgatgaaagctggtgtaccactcgtacaaggctttgaaattgtagctgaaggtttagaaaacccggccatgcgtgaggttgtactcggtattaaaggtgaagtcgaaggtggtagtacttttgcctcagctttaagaaaatatcctcaacattttgataacttgttttgttcacttgttgagtctggtgaacaatcaggcgcactcgaaacgatgctggaccgcgttgcaatttacaaagaaaaaagtgaattgctcaagcaaaaaatcaagaaagcaatgaaatacccggcaacagttattgtagtagccattgtggtgaccattattttgatggttaaagtagttcccgttttccaagatttatttgcgtcttttggagcagatttacctgcatttacgcaaatggttgtgaatatgtcgaaatggatgcaggaatactggttcattatgattattgcgattggcgcagtcattgctgcctttctggaagcaaaaaaacgcagtaaaaagtttcgtgacggcttagataaactggcgcttaagttacctatttttggggacttggtttataaagcaattattgcccgctatagccgcacgcttgctacaacatttgccgcaggtgttccacttattgatgcattagaatcgactgctggcgcaaccaataacgtgatttatgaaaaagctgtgatgaaaattcgtgaagatgtcgcaacaggtcaacagcttcagtttgctatgcgggtctctaatcgttttccatcgatggctatacaaatggttgcaattggtgaagaatcgggtgcactagacagcatgctcgataaagttgccacttattatgaaaatgaagtggataatgccgttgatggtttaacctctatgatggaacctttaattatggcaattttaggggtgctcgtaggcggtctggtaattgctatgtatcttccaattttccaaatgggctcagttgtataatgcaagacatcattgcgtattttattcaaaacttaactgcactttatattgctgttgcactcgtgagcctatgtatcggtagctttcttaatgtagtaatttaccgcacgccaagaatgatggagcaagattggcagcaagaatgccaaatgttactcaatcctgagcaaccaattattgatcatgagaggttaactttaaataagcctgcttcatcgtgccctgcatgtcagcaaccgatccgttggtatcaaaatattcctgttataagctggcttgtgttaagaggaaaatgtggccattgccaacacccgatcagtattcgctatccagccatcgaactactcaccatgctatgttcattagtagtagtcatggtatttggcccaaccatacaaatgctttttggactcatcctcacatgggtactgatagcccttacctttattgatttcgatacacaattattgcctgatcgctttaccctacctttagctgcgctcggcttaggtattaatacctttaatatttatacctcacccaactcagccatttggggttatctcattggtttcctatgtctttggattgtctattacttatttaaagtgatcactggcaaagaaggtatgggctacggcgactttaaattgcttgcagcattaggagcatggatggggccattgatgctgccgttaattgtgttattgtcatcgttaattggcgcaatcattggcatcattttattaaaattaagaaatgacaatcagccttttgcttttgggccatatattgccattgctggttgggttgcctttttatggggtgatcagattatgaaaatttatttgggaggttaagatggcttttattctgggaatcacaggtggtataggcagtggtaaatcagctgcaacacaatggtttgaatcccaaggaatccaagtcgtcgatgccgatattgttgctcgcgaagtagttgaaaaagggcaacctgcccttcaaaaaattcaacaaacctttggagattgggtgcttcaacccgatggcagtctggaccgccgtgccttacgtgaatatatttttcaaaatccacaagcgcgtcatacactcgagcaaattacccatcccgcaatccgtcaatctattattcaacagctacaaaatcctaaaagtccgtatgtgattttagtttcgccattattgtttgaaacaaatcaacatgaactggtcaatcacacgctactgattgatgcgagtgaacaaactcaaattcagcgtgcgagccagcgcgatggacaaaaccaagaacaaatccagaaaattattgctgcacaaatgccacgcgaacgaaaacgtgagcttgcaaatgacatcgtgtttaacgacggattactcgaacatttatatcagcaattagagcctttacatcaaagctatttgaagcgtgcaaactaattttgtgtattttgctgcttaatcttttgtgtcaggctatcttgtctaaaccagcgccaaggctgtaaagcgcctattcccataccgactaagcccactacaattgatgggcttaatgactcaccaagtaagggtacagctaaaatagcagcaataaacggtgccaaagttacaatacttcccgttttaaatgcgccaagacgctgaatagcagcaacataggttaatgtcgcaataataacgacaaacacgccatgaaaaatactttgtacagctaagtgcaaaggatctacatccataaagtgcttaggtaagaacaacaaataaatcggcaaataaataattgcagaccagattgcgacgcttgccatagaatgccaagcagagagcttccactgtttaagtagtacagtaaaaatcccccaccaaatcgcactgataaacagaagtaaatctccaattccaaaagcagaggtactacttttcaacatcaatgcgctcatgagggccaaggcagtaatcataattgccagactcacccatgtatgtttatcaaatggctgtctaaataaaatataagcagctatagcggtacagataggaatacagccatttaaaaatattgcagcatgtgcagctggtgcataaagaaaagctgtataaaccgtaaggcagtaaatgactccaccaatcaatgccaaaataaccgcatgcttactccataaaaaagcgagatcttttttataaattaagataggcatcaaaattaggaaggctatagcaaagcgtagtgcggcaatatcccaagcactgatgtgccattgtgcatttaagcgggcaaaaagcgtaaacccgccccaaatacacatggtcaccaatacaaaaaaataaccttgcgtacggggagacatatcaagactgcataaaaactaggaaggcagctaaattatacctcagaacgctgacgacaagcttcataaagtgccatacccgttgccacacttacatttaaactttgtaagttacccgacattggaatataggctttttggtcacactgtgcttgagtaattggacgtaaacctgtgtcttctgcacccattacaatcacaacagcacccgagaaatcacacttctgaataggtaatgcattttcatcaagcatcgtaccaatcacacggacatgagttgtctctttaagatgcgctaaagtacgagccaaattagtcacttgaataaatttaactttttcagccccacccgctgcgactttacgagcagttggagttaagcttgctgagcgatcgcgaggcacaatcactgcctgaacacccattgcagcggcagtacggatacatgcccctaagttatgtggatctgtcacctgatctaatgccagcaataaggcatctggagtttcagccaagagctggtctagatctttttcatttaaagtcgggtgcggacgtactgctgcaactacgccttggtgaaatggcaaacccgcaagcttttcgaggctatcacggcttgctttttgtacactaattccaaaaggctctgccaattgcaagatcttctgcaaacgctgatcgtcgcgccctttcaatgtaaacagggtcagcacgcgctccggctcaagttctaacaatgactccactgagtgaacgccataataatattccggttttgccatgcatgacctctaacaacgtttgagcaaaaaataaaaatcctgtaaagccaacttcacaggatttctttgggcatagtgtacccgatttaaacagtaatttcttagccttctaagtggcaaacataatcgagtacctcatcagtctcgattttgaaaacgctattgcctggtacataaaaagattgaccagcgcggaacaattcactttcattgctgtctgcaattttaacgcgacattcacctgaaataatttccatacgctcaggaacatgggtttcaaatgttaaaggctgttcagtcggcaaaataacacctaatgtttttttcgttccatcttcaaattgcacggtatggctgatacatgctccaccaaaataaacatttgattttttgatgaccgttacatgatcaaattgggttgaactcatgcacactctccagataatgccgcatttatataaattatgatgaatgtagtttaattgtgcctaaataactaatcaatcagttttcatacggatagacttgtaatttccactgctgtaactgaatttttttagcaaaagcgtggggtaaattcacttcaatatttcgactcttcgacacaattgcatcgtatctgcaaacttcatcgtgattttcatcgaataaaatccagtaaactttttctgccgttggatgattaaccgcagttgtaactattggtgaaccattatccatccctacatgaaaattgtcttggtcattttgcattgaagttagatcataaaccggaaaatcggcactattttcatcaaattgctggctatcatgtacaagcacactttgttttaaagtcggccaaatacaataacgcaggtaatgttgatctatgactcgattgtccggataccttccagtggcaacataatccctgatatgtgcttcaatattatgaaaaatacctgtacaaccgccccacatacccgccaaaattaattcagtatgagaatagctatctctcattaaatggaaccattgatcactcttaagccaagcatcaacagcggctttttcacgataagacacgatagagtcggcatcacgtactaaaaaccgtttaaccaccggatcatccataactaaaaagcgccaaaataaacctgataactgtttttgagtggggctgacatgtacgacttgtgcaccatttgcttgtaaccgctgttgtacaagttcgggaacgctctcatccacatagaatcgacacgtccattcaggatagatttcttgagctaacttagtatttaaaatggaagtttcacagtaccgcggatttgctccaaatagagaaaaagcaataatattttcttgtggatttgggctaaagggcacgggtttatgagtgggtatatttaaagtaggctcattctttgtaagttcttttttggttgaaatggctaaacgcccaaatttaatcttctcttcttttttatttaaatgatgacaaacttcggtcaatccatcgtataaatttgtattaacgttagaaccacttgctttaatggattgcatataatgttgatatgcatcgtcataacggcgtaaccgtagctcggtataagctaaatcagacaatgctccgggatgtccgggaaccagacttactgctttttttacatgttgatatgctttgacataatcaccttgtgcagcagcctgtttaaatgcattaaaatgctgatttaaaattttattcatttcagcaggattagtttttttatggcggttgatcatccctattggtgctttcggtaagcttaatgtttttttcattgtaaagatccgcaatcttgctgttctataatttcagttagaataatagatcacttgtagcaaattcaaaacttctctatctttaacccataatttggcgcgttggatgcgtttatgctcacacatttaactttaattaattttgcattagctgatcatttagctattgatatagaacaaggatttaatgttctaacaggtgagacaggtgcaggaaaatcattattactggatgcactatctgcctgcttaggggaacgtacagatacaaattatgtccgctatggttcggacaaagcggatgtaaccgcagtttttacttatcaggacaatagccctgaagcaaaatggttaaaagaacatgaactagatgatgattcaggggaaattcatttacgtcgggttatttttgcaactggccgtagcaaagcatgggtaaatggtcgtccaagtagtctctctgagcttaaagaattaggccgcttattggttcagttgtatagccagcacagccaacaacaactacttgaaccgccttatccaaagcattggctagaccgttatagtaatttttacgccgaagcaaatgatgttcgtgaagcatatagtacatggcagcgtaatatccgccagcatcaggctgcgctcgacgctcaggcaacccgtcttcaacgtattgcgaccttagagttacaaattgaagagcttgaggaagtcattcaaaccgattacaaagaaatcgagcaagagttcgatcgcctcagtcatcatgaacatatcatgcaagactgtagctatagtttaaatgcacttgatgaagctgaacaaaacattactcaagaaatgtcgtcgatcattcgccgtctagagtctcatgcggggcgtagtgagcagctttccgaaatttataattcgttattaaatgcgcaaagtgaaattgatgatgccacatcaaatttacgtcaatttattgaccgtcagagtttcgatcctgaacggatggaagaactgaactccaagctagaggttttccatcgacttgctcgtaaataccgtactcaaccagaaacacttaaagaagagtacgaaacttggcaaagtgagcttgagcaattacatcagttagaagaccctgaaactctggctgaacaagtagaaaagtcacatcaagaatttttagaaaaagcccagcatttggataatattcgtcgtgaagctgcttccccacttgcaaaacaattaactgaacaggttaaacctttagcgctgcctgaggcacattttgagtttaagtttgaaccattagaacaaccaaatgcagaaggtttaagttttattcaacttttatttactgccaataaaggcatacctcctcaaccattggcacgtgtagcatctggtggtgagctttctcgtattgcactcgttatgcaagtcatgaatgctgaaaagaccgaagcagaagttttggtatttgacgagattgatgtcggaattagtggtggtacagctgaagtggttggtcgtttattggccgacttggctcagcatgtccaacttctatgtattacccaccaagcacaggtggctgcacaatccgatcaacatttgttagtcaaaaaacaacaaactgatccggcaagtagtactattgtacaacttgatgaaaatcaaattatttccgagttagcgcgcatgtccggaggtgttgaaattaatgaaacaaccttgcagcatgctaaacaattacgtcaacttaaatttcaggcttcttcaacttaataaagaaaatgagagaaaaagattggcgaaatccgattaactcttgtatgttgataaaaagaacctatatagataaaaagggtcgagagaccctatagcgacattttttgagggagaaccgcttaggtgaccaaacaatatatgactcaccgttgtctgattgccccgccagaaatggcagatgacttttttgcaaatacagtaatttatcttgcccgtcatgacgaagaaggtgcccaaggtattattatcaatcgccctgccggtatccaaattaaagagctactcaatgatttagacattgatgcagacaatgtaaatccgcatgaggttttacaaggtggtcctttacgccctgaggcaggctttgttcttcatacaggccaaccaacatggcactcttctattgctgtgggtgagaatgtctgtatcaccaccagtaaagatattctcgatgcgattgcgcataacgaaggtgttggccgctaccaaatcgcccttggttatgcgagctggggtaaaaaccagctagaagatgaaatcgctcgtggtgactggcttatctgtgatgccgatatggatctgatttttaacttaccgtacgatgatcgttgggatgcagcctataaaaaaattggtgtagatcgtacatggctggcttctgaaatcgggcacgcctaatgaccgcaacgcaatcaaaatcaattatggcttttgactttggcactcaaaagatgggaatggcgattggtcagtctgcaattgaaagtgctaacccattaccactttttgtgatgaaagatggtattcccaactgggaccaacttttaaaaattgtgaaagagtggcagcctgatttgtttattgttggtcttccattgaatatggatgatagcgagtcagaactttcaacacgggcacgtaagtttgcacgtcgcctacgccatcaaaccaatattgaaacgtggatggtcgatgaacgactcaccactcgtgaggcaagagaagaacttggtttttatcaagaacaaggtcgtgccaagaagttgtcagccgatagttttgccgcagctttgctaattcagagctggtatcgcaatcctgttggtttaacgccataaaataaaaaagcatgtttcaaacatgcttttttattgagtttaaaaacttaagctttttatttttcaataatatgtactgtagcagtacggccagacacaaaagccaactcattttttggtgcttcgtctaatacaatttttacaggtacacgctgcgctaaacgaacccaactaaatgtcgggtttacatttgcaagcagtttcgaactacttgaacgctcacggtcttcaatacccgatgcaataccctgcacatggcctttaattttctgtctatcacccattaattgcacagttgcttcatcgccaatatgaatacggtctaattttgtttcttcaaaatatcccacaacataaagctgcttacgatctagcaatgctgcaaccgcttgtccaacttgaacataattacccggacgcaaatcaaagttagataatgttccatctgctggcgccacaacagccgcacggtgcatattgagttctgctaaatgtaaattacttgttgctgcttcaaccaatgcctgttgctgtttaatagtggcttcagcttgttgaatagcagcttggagttgctcatgttccgcgtgtgattgatcgcgagttgcaaagacctgatcttgttcttgcttagaaattgcaccatccattaagtttgaataacggtttgcgtttttctcggctaacttaatgttagtacttgacttaatcaagtttgctttagcttgggctagacctgcttgtgcttgagcataggccgcttttgcttttgccaaatcagattttgcttgctctacatctaaagctcggcgagagacatcaattttaaaaagcacctgacctttttttacagtctggttatcttgaaccaatacttccgttacaagtcctgctacatctgaagagacctgaataacgtcaccacgaactcgaccatcacgtgtccacggcgctgcattatagtagttccataaatgcacaatggtatagacagcaatcattaatgcgacaatcaaaatcactggacggatgacttttttcaactccaattgattcattttactcacctaactcaatctttaatctggcaatcatctttaagcacctaacccaacaaaaatttggtgtatcaccaaaagtagtaaaaggtaaaaacacaaattgaaaatactgggtaatgcaatccagccttgtgcaatccatttgttggttaagggacttaaccagcgaaaacatatatatgcaaaaatggcttggacgagcaaagcaggcacgtaaataccgtagacattaaactcacccatgcgctgtggctcctgtaagcgtacgatctgcattcatttggtttgatgaaacatgacacatgctataagcaatattatttagtgaaataaataatctttgacgcagagtcatatcttcaatatttgaagcaagttgtttaagttcaaataaggtttggtgaatgtgctgtaccaatacatcactttcacctttttcattttctttagctctaaacagctcatctaaatcttgttgcaaacggccaatgtgatgggccaattctgaagatgtcggaacttgatttgctagctcttgtagtcggcttaaatcaatgatcgcactggattcaaccaaagcctgttgaatagattttttaatctcttctgactgaaccattttagtatttaagacaccaacacggtctaacatcccccgtaagtgaactttaaattcaataccataaggaatgtatatggcttggcgcattgcacggtaatgtaaagccaaaatacggtttgcactggtatcgggtgacatagcacgcacaacatcaataacgactaatgacaccaatacgcccatgaccataccaaatgagctatctaaataagacactgcatccatactgtaagcattatgcaagttcagccccatcatggtattaatacctagcaccatgcccactggcatgagtgcctgattcgccatcatggaaaccgcaaacaaaaacattggtaataagacgagtccaagttcccaaaatgttgtgacataaggaaaaataccaaacgcgtaaataaaaactaaaaccgccgaagccacactgccccatataaaaatacgtaagacaggaaccgggttatctagtgctgttaagatacaggcagtgactgcaccgatctgtgccatcatgaacccagctttccagccagaaagaatccacacaccagtcacaataaatgtaatcagcactgcactaataccacctctgactgccacaccatgatctcggtgtaaacttggataggtcgtagtcattggggtaatgttatctggaatctctttattaccttgcttgatgcgttgccataaaacttttacagctaaaacattactaatgaaatgacgcacatccattttcatggcagccaataacacttgctgatgttcagaagccgaatcatttaagttcaagaaatcattttcaaactcgtcaggtaactgcagaatattttcatcagtcatctgatctttttgttccagaaaatgaatcacatgccctgaaagctgctttaatttatctgaatgactttcaataaaattgagttcttgcagttgtttaattcgttcagataaagcaaccaagttcgcgaccaccatcgacatttgatggagcatttcttgcaaaggtttggtcatcccatgcaactcacctttttcatagctcaagtgaactgccagagcatgaatatcggtcgtatcacgagtaatagcagctaaaagctgtgtattgttttgctgttgatctgcatttaacaaattagcaaacaggttttctgtatctttgagggtttttgttacacgctgtttgattgccgaaccaatatgcatgggcaaaatagtcgcagacacaaccgcactcgaaatcacaccaattgaaatctcaagtacacgagccaaagcaatatcaaaaatattgtactgatcaatataagtaatcgcgttatacacaatcattgcggttgaataacctgccaacataaatgcataactgcgaggagtacggtctaataaagacacataaagcgcaaagcccacccatagtgataacacaaccgtaaagatccacggcgtattaatcagatgcggagtaatggttaaggcaataatggccccgcctaccgttcccaataaacgataaacacacttagacgacaccatacccgaataaggattggcgataatcaggacggtaccgatcgaccacattggattaatcaggtctaattcgaacgatacaaataatgccaacataccggcaataaatgtctttattgcaaaaattagatcaagcttactcgggcggaaagccagtatttgctttaataacatgaactcatctcaaatatagatttgaactgatgagcatgctcatcagtgtccgtttgcttttaaaaaaagacaatacgactttgccatttgcctataagacaaatgagttaatgagagcatccttcaatacaatgatttttcctacatctctgcatgatgtaccgagatgatttcagtttgaccgctatttatacgaccaagcttaggaaagaagagacatcgagaaagccggcagaataaaccactttctcgattagatattttgttgcacaattttttcaaattaaagtgatttagtcaactaaaatatctttatttgataatttgatatgtttttagttaatcatatatgatgtgtgaatcaagagaacttttctgattctgagcgtaaaatatttaaatcaggcagttatcttggaattgagacaaagcttcaatttttctgttataagaactcaagtgtgacccgtttattaaggatacgaataagacatcatggcaatttcaagttttggcaaaattttaaccgtactggatttattttccgtttcacgaccagtgattaatgtcgatattatttgcgaagaacttggcttgtctaaaccgaccagctaccgttatctgaaagaactcgtatcagccgacttattaaaacgtattaatggtacttctggcgattacactttaggctcaaaaatagcagttcttgactatgtatctagaacaaccgacccattggtccaaatcagtacgccatttatgcgaaatattgtagagcgtactgaactttgctgtttactcacctatttaaatgatgactactgcattgatattcatcatgagatttttaaagatactgaattactttcatatggtcgaggctgcccacgcccaatttatgttggggcttcaccaaaaacgatggtttcacatttaagcaaacaacgcatgcatgactactatgaacgttttcaacatgagctgtctgaatcaggttttgctgtagacgaacctagctttattcagcgtatgcgtaaaataaaaaaacaaggcttctatttctcgcaaggtgagattgaccccaatgtttcagggcttgctgtacccgttcgtttttcgagtaaagaagttcctttggctttaacgttagtcgcatcaaagaaccgctttgattttttaaatattgaaaagttgattgaaattttgcaagaaaacgcggcattgattgagcagcgctttatggaactttcagaaaagggcgagatctaaaataatatttttgataatttaaagttttcttacactttgaagcattgaaaatatccaaatattctcatattatgattttagcacctattgatgattcttttcatcagcagctcatcaatagtaggctctccctcagaggaataagctcatgttgccatcatgggcttttttcttgcccaatttttagaaaaaacttatgaaaatttgaactgacgaaaagtcagattaatgcgtggttgtaaaatcttggttgaacgatttaaacggtgttgccaatattgttgagtctcaccacgcatcacaataagttgacccggttgtaaccacatctcaactttttctttagtttgaatatgcctaaaagagaatttccgcgttgctccaaaacttaaagaggcaattgtagtggttctggctaaagacacatccgaatcactatgccaagccattccttgtgttccatcttcatacaggtttgccaagcaagaattaaatttttctgaaaggatctgctctacttgctgttttagctgagcaagtgctttgtcccacggtaaagaatcacgaaagacaccagaatatttatatcgataatgctcatctccataccaagcaactttacgaggtgttataaagtgcttgccatatagcttcgcttcatcatgtcgccacgccagatattgatacaaataatgaaaatattgttcagcttcttcggcagttaaaatacatccataatcctgaacctcaccatcataaggcaataaatttgaacaaggttccggagaaaataaatctagtgtcatgcaatctccccttgctgcttagccatctcccaagctaacaatgccagtttacgccctttttgccaatggtactcaccgaccattcctgttgcgcgaatgacccgatgacatggaattaaatacgcaatcggattttggccaattgctgtagccactgctctgactgccttaggttttccaatttgctcagcaatatcttgataggttcgtaactgcccttcgggaatagtaagcagtgcctcccatacttgtagctgaaatggtgttcctgcaagattaagcggtaatttctgctgtaaatgttctgagaagtcttgtctaaaccactgtgcaatctgttgatgccaaatcggagagtgattttttaactgagctttcggaaaatactgtttaacgatttcttgtatgttctcactatgatcaacaaagcgaacagaacaaatccctttatcactacttactaccaataagtcaccaaatggactcgtttcaactgaataattcagttcaacgccatcaccttgctgcttgtattcaccaggggtcatcccttcaagctgaataaacaaatcatgtaaacgacccgtacccgacagtccagtatttaaagccgcatctaataagctacgttgctgcattaaataatattttgcttgctgcaagctcatatattgcacaaacttcttagggctaatgcctacccattcttggaactgccgctggatataactcggacttaaattcatatatgtagcgacatcttctaagcttggttgctggtctagatgttcatataaatattcaataattgtggcaatcgcagcaaattgccgagaagaaagcatttgcatctgtcacctccttagtactcaatcttactttaaagtagccaagaccccatgacgacccgattcttgcactttccaataaaaaagcctttctcaaggaaaggcttttgaacatctttttaactttatggctgctttaggtatggccatgcagcttttaaataaataaacattgaccataaagtcagaataacggcggtatataacaaagcataggccaatacttctaaaggctgccaattcaacaggaatacactaatcgcaatcatttgaaatgcagttttatatttaccgactgttgatacggctacactggtccgcgcgccaagttctgccatccactcacgtaaagcagacacagtaatttcccgtgaaataataacaattgcagcgaaagccattgcaattgtcggtttccactgcactaaaacaataagtgcagctgcaaccataagtttatctgcaaccgggtctaggaaacggccaaatgctgaagtctggtttaaagttcgtgctaaatagccatcaaaccagtcggttacggcagccagcacgaaaatagccgtcaagataatatgacgtgtcatacttcctacgtgctcaccaatacctattgcaggcggccaatatgcaatcaccaaaaatacaggaataagcgcaatacgcgccaaagttaggatatttgggatattcaggattcgccctgtggtcataaacaccgccaatttagtcttcacgcatcttttaacagacaaagacacatacttcaatattgtatctatctgtaacagccactttatacgaaatatgtgaatcgagaaagtagattacttaggtaaataccgtaacagtttgccgcaagattgcaattaaatgatcattttgatcccaaagatatgcatattctgtggagtacccctcagctgcatattcagtagttactttatatttaaaccagtcacacaactggtgccgaactggatgaacataagtaatatgccatgataaagaacttgcaggtgcaacttgcttaaacataggcaaaacacccggtggccaaatatccataagaacaatcaaatcagataatgtcatttgacgattcgcatgctgctctggtgagaaccgtgaccagccaccaaagtcggggtgtttacttcccgttaccggataattcccctcagcccaacagacttcaaaatgctgaaagcattcaggcatatgtttcgcaaaaggaatgacagataaattttcaggtggtacataagcagggacgactggctcttgctttacctcaatactcgatgcacgagaagccccaaaacttgcaaccaaaatcgtttgtaccgcatcatcttgccataaacgcgcttcaagcgtagtgactgactttccttctcttaaaacttcaatagtcaatcgggcagcgccttgttgtacggggcctacaaaaataacactacaacttaataatcttttatttgaatcttgaatataggagcatgctttttgcattaataccccagcaacaagaccaccaaaaacggtgcggccctgtaaccatcctgcaggtatatcaatccattcattttgttttacatcttcccatagttgcagtaatgacattcatatccctaaatcatgcgcatggttaagaaatatctttcatcattttgaccaatatgtgaatgatcattcagctattaatttacgagcacttttgtcactcatcttctcaacacatgactactcatgcaaaattttataaatcgttcttgccatcacttcacctaagcccggcacgactgtcagttctttttcagatgcttttaaaacaccttgaatcccaccaaaatgtgttaataaatctcgacggcgtttaggtcctaagcccggaattgcttctaaaactgaggtgctacggcgtttatcacgtttagcgcggtgtttagtaatggcaaaacggtgagcttcatcacgcacctgttgaatcaaatgtagcgccttactatcttcaggtaactggatttttgtgccatcggtaaaatgaagcgtttcaagccccggtttacggccttcacctttcgatacacctaccataaaagcttctaacccaagctcttgcattacttctatggccatatggagctggcctttaccaccatcaattaaaagcagatctggtaacattgcctttttatagcgacgcgttaaagcttggcgcattgctgcataatcgtcacccgcagtaatatcttgaatggcaaattggcgatagtcccgtttacgtgctccaccttggtcaaacactacgcatgatgcgatcggtgcttcgcccatggtatgactaatatcaaaacattcaatccgatcaattggacggccaactacctgctcaagctggtggaaacgctcattgagttctaagtggttactcaactgccctttaatcgcatgttgaacattcatttcggcaagttctaaccattcagcacgtgtttctcgtacactgctcttaatctggactttctttccaaactgctgtgctaaggcttcttccagctctttacggtcaggtaaggcagtattcacaatcagttcgcttggtacttcatcggcaacctgaaagtaaaagtttgccatgaagtcacttagcatttgaccaaggtcatcgcctaacatgtcagggaaatagcttttacctcccaacatacgaccgttacgtacatgcataatctgcacacatgtcacaccagcctgataggcaattgctaaaatatcggcctcacctttcactttgaaaacggcttgctgtgcttgtacttcgcgaagtaaagacaaccgatctcgataaaaaaccgctttttcaaattcaagatctgccgctgcctgttccattttcgcaatcagttcctggtttaattctttggtgtcaccttgtaagaaacgaatactgttattcacgtcttctttgtaatcttctggtgaaaccaagcctacacacggggccgaacaacgcttgatttgatattgcaaacacggacgtttacgctgtgagaaataactattttcacattggcgaacattaaaaagtttttgtaaaaccagtaaggtatctctggcactataagcacttggataaggcccaaagaatttaccgatttggtgcttacctttgccacgtccactggcaattcgcggataaggtttatctgccgatacaaagatatagacatatgacttatcgtcacgcagcataatgttataaggcggacgatgttgtttaattaagttttgttctaaaagcagcgcttcggtttctgaacgcgtaactagcgtttcaatatcataaattcgagcgactaaagcttgagttttcggatgctcaatggttttaacaaaataactcgacacccgattttttaaatttttagctttgccaacatataacaactccccctctttccctagcatcttataaacgcctggaagttgggtcagattagctaaaattttttcaatatggggacgagcgttttgattcactattggcatacatggcttaatattgaatacctaatgtgatgttttcacctttacttttcaagtgctttactgtgccagaaactaaatttgaaaagggataggaaactagcccgacaaagtgtgtcgtacttccttaagaatcgaggcgatagtaactatatttcacatctttttctttatagaccgcataggttttttgacggaaatcagagaaccagccattacccgtatagcccgcaatatgcccgtaagtatgaccactggtacgttcgataatataaatatccccttcttgaggacgattaaatgccggcttgattttcttataaccgttcttctcaagtgtatgcccccagtctgaagctgctaccggatgcttagacacatcggcacctgctgcttgtaaagcaatacgaatatttttggcgcatttctctttactatgtttggcagatatactttcaagcttactagagaacttatgcaaattaatattttggtcttcagttttatgatttttagttctagatcgtttagatttttcagtcgtcgaagctgcttgtcttaacatcacttttgtttttaaatcgccttgagaacggtcttcttttctctcttcgatatgatgaacatgtgcatgagctgcgtgatgagcatgagccattttaaaacctacttccgctaaccaagtcttcgaaaaaaccgcgccattgtagaatcaaaattatctgttggcttttaatagttgtaacaaattgccagcactgtgaaatgagtcacaaaatttaataaaggttaatttctatgaatactaaagaatttgtcaaagaacttataaatactatttcagacgaatatatcgatacttataaacagatttactcctctactttaatcgataataaaattaaagaagatccctactggtttgatgctctcactttttatcaatctttatctcaaaaagataaggaaaccttatttaaaatcattaaacagacgactattgatactacaagtataattctaggtattattgatggtccggtgagcttaaatcagatccctggtgactttacgctgacatatacagaaaatgagaagacagtaattttaaatggagatctacaggatgaattccttaccaaaataaaagaaagagacagatcacaatgatatataaggaattataacgagagaaatataattatgagattaaaacaaaagcttatttataaaaactcgaaaaaacgaaaaaatcaaattaatactcgaaccttgggcagaagaatataatattgaatcaaattctgaagtagagattattgttgaaggcgatatagaaaaaggatatttaatgattgaatcagagatagatcgtgttgtcatctatggttggcaaggaagtcttattcaagtcttcaaaaatgataaacttattgactaatgattttattaataatctattccttataacaggttattttagcttaaaacaaaaaacgccctttcgggcgctttcattaaaacacgtatggtcgaacaaaaatcaggaagaaaattccaagcatgaggaaccacttcaagaagtaatacaatttacggtttttagcttttaaagctttagctttaatacgaatttggtaaacataaccaaaggctttatttaagccccctgtttggtcaccagtttcattcggtgaacttgccgcagtcatcacattacgaccaaaccaatggttgaaacgttccatccattttactttcattggacgttcaacatcggcaaagaagatgatacggttttgatcagtcttattttcagcatagtgaatataagtttcgtcaaacacgacactttggccatcacgccaagagtatctttcaccatctacgtcaatgaaacaacggtcatcattcggagtaatcagacctaaatgataacggagtgagcccgcatatggatcacggtgtctgaccaaacggctgtcaggagcaagctctgtaaacattgccgctttaatcgttggtaatgttttgagtaaagccgttgtttttgggcaaagctcagcagcagaaggatggcttgattcataccacttgaggtaaaaacgtttccatcctgttttaaagaacgagttaaaacctaagtcgttataggtacttgatgctttaatcccaccttggtcatataaagctttcgcttcatctcgaatcatttcccaattttcatctaacacttttaaatctttaaagtgttgagtgtcgatatagggttgattcggtacctttgaaaagatgtacattaaaaagttaatcggtgcgagcaaggttgaatggtcaaaaaattgacgataaaacgagtgacgcactttgccgcgatgttggatatacaatgcagatatcacaaaaatcgctaatatgatccacttaatcatattgctactctttcaaagtttagggcaaccttaccttaattttctaaggtaatagcaaccggaagtttatttaattggcgcaaattttaacaaaattgacttataaaaagcgaatgtaaaaaattaaacattgtattttggaaaattaaggggtcttaatataaaaaagcgcttaatttgtggtggtgatcattcattagaaaattgtgactttgtagtcgatttttttaaacattacaccagaacaattgacctttttgacaagaagtgaataggataaaattctcattttttatataaaaaattaaagatttatactttttataaataaaaacttaaattaaaacaaaagcctttactcagcagctatctctatgattttctttatgcatttaattggtatgaattcaattaaaaataagatgacccttgcgtcacggcttgatacaacttgtcgggttctttttagatatagttatcgtaagattagcgaagcataaatgtgtaccggagctgtacacacgcttcataacatcaacttagaaatcctccaaaactaaggagatcaggcatgatccacgctggcaatgccattaccgtccaaatgcttgcggacggaattgcagaattccgctttgacttacaaggtgagtcggtcaataaattcaaccgtgcaacaattgaagatttcaaagctgctatcgcggctgtaaaagctaataacgatattaaaggcttagttgttacctcgggcaaatctacattcattgttggtgcagatattaccgaatttggtcaaaactttgcacaaggcgaaaaagcgattgttgactggcttatgcctgttcacgaaatcttcaatagctttgaagatttagaccttccaaaagttgctgctattaacggcatggctttgggtggtggttttgaaatgtgtttagtttgtgactatcgcgtgatgtcagaagctgcacaagtcggtttaccagaaatcaaactcggtatttaccctggtttcggtggtagtgttcgtttaagccgtctcattggtattgataatgcagttgaatggatggcaatggctactccaaagaaaccggctgctgcacttaaagatggcgctgtagatgctgtggttgctgcggacaaattacttgacgctgctactgatctggttaagcaagcgatttctggtcgtttaaactggaaagcaaaacgccaagaaaaacttgaagctgtaaaattgaacccacttgaacaaatgatggcgttcaacacagcaaaaggtgcggtacttgctaaagcaaatcctgctcaataccctgctccaaaattattacttgattcattacaagctggtgcaagccttgcacgtgatgaagcgttaaaagctgaggctgaaggctttgccaaagcagccgtaactcctcaagctgaagcattaattggtttattcattaatgaccaagttgttaaaaaagcatctaagcaacatgaaaagggtgctcatcctgtaaaccaagctgctgtacttggcgcgggtatcatgggtggtggtattgcttaccaagcggcaagcaaaggcactccaatcatcatgaaagatattggtaacccacaacttgcattaggtatgaaagaagcaaacaacttgttaaccaagcaagttgaacgcaagaaaatgaaacctgcgcaaatgggtgaaacacttgctcgcatccgtcctactttaagctacgaagagtttaaagaagtcgacatcgtgatcgaagcggtaactgaaaatccaaaagtaaaagaaatcgtacttgctgaaactgagaaaaatgttcgtgaaaacacgatcattgcttctaacacctctaccatttcaattacacgtttagcaaaagcattacaacgtcctgaaaacttcgttggtatgcacttcttcaacccagttcacatgatgccacttgttgaagttattcgtggtgagaaaacttctgaagaagcaattgcaactacggtcgttcttgctcaaaaaatgggtaaaacaccaatcgttgtaaatgactgcccaggattcttggttaaccgtgtattgttcccttacttcggagcatttgaccttcttgtaaaagacggcgcagatttccagcaaatcgacaatgtaatgtctaagttcggttggccaatgggtcctgcttatctgatcgatgttgtaggtatcgatacaggtgtacatggtgctgaagtgatggctgaaggtttccctgaccgtatgaagccagattacaaaggcgcgatcgaagcaatgtacgaagcgaagcgtcttggtcaaaagaatgatgtaggtttctacaaatacgaactcgacaagaaaggcaagaaagcaaaaactgttgatccaacagcgtatgaagtaattgctccattcgtaactggcgaaaaacgcgaatttgataaccaagaaattattgaccgtatgatgcttgctctttgcaatgaaactgttcgttgcttagaagacaacattgtagcgactgcgtctgaggcagacatggcaatgattatgggtattggtttccctccattccgtggtggtccatgccgttacatcgaccaaacaggtgttgctgaatacgttgcactttgcgacaaatatgcgcacttaggtaaggcttatgaagcgccacaaatgttgcgcgacatggctgctaacaacaaaaaattctacggttaaggagcgacgtgaatggctactttaaatccacgtgacgttgtgattgttgatggcgttcgttctgccatgggcaaatctaaaaacggtatgttccgtaatgtacgtgccgacagtttatctgctgaacttgtacgtgcgctcgttgcccgtaaccagtttgatgtaaatgaagttgaagacctgatttggggctgtgtaaaccagaccctagaacaaggtatgaacattggccgtaacatcggtttattggctggcttgcctaaaactgtggctggtcaaacagttaaccgtctttgtggttcttctatgcaggcaatccacactgcggctgcacaaattgcaacaaaccaaggtgatatcttcattattggtggtgtagagcacatgggccacgtaggtatgatgcacggcatcgaccttaaccctgaagcatctaaacactacgctaaagcatctaacatgatgggcttaactgctgaaatgttaggtcgcatgaacggcattacccgtgaagaacaagatgcattcggtgttgaatctcaccgtcgtgcttgggctgcaactcaagaaggccgtttcaaaaatgaaatcattggtgttgaaggccacgatgcaaatggctttaaaatcctttgcgacatcgacgaagtgattcgtccagatgcaaaccttgaagcgttcaaagcattaaaacctgtatttgaccctaaaggtggttcagtaacagcagcaacatcttctgctctttctgatggcgcttctgcaatgttgcttatgtctgctgaacgtgcacaagcattaggtttaaaaccacgtgccgtgatccgctctatggcggttgctggttgtgatgcagcaatcatgggttatggtccagttccagcaactcaaaaagcgcttaaacgtgctggcttatcaattgctgatatccagactgttgagttaaatgaagcatttgctgcacaaggcttgtctgttcttaaaggcttaggtctgtatgacaaacaagacatcgtgaacttaaatggtggtgcaatcgctcttggtcacccactaggttgttcaggtgctcgtatcaccactacgttgttaaacgtaatggaacaacaagatactcaaatcggtcttgcgaccatgtgtatcggccttggtcaaggtatcgcaacagtgatcgaacgtgtttaattaacaccaagataaaaaaatccccgctatgtgcggggattttcgctatgtgcggggatttttttatcgaccttttaaaccatcttgaatttgctgctgtaatttcaaaatatcatctaaatttactttcatcgtaccttcacgataagcatcgacattacttcggttaatttgtagaggctttaacatttcaaaaagaccattggttgggtcagaagattggattccacccgctacagctagaatatattctcgtaaaaatggagaaagctgggacaaatcgggctgtgccatgacaggttgatagtctactgtcgtcataccttcagggactaaagcattctgtatatcgttatgagttttatactcacgatgttgtagagcctgacgcacttttttatcttcttgaaatgggacaaagcctacttcttcacgtagctcagattcggccataacgcgaattgtaggtaaagtagccacttcttctgcttgaacagttggtaaacccataaaagcaaatacagcaatgaaggctgattgttttagaaagttcataacttgctcccaaaatcagtcaccctacgcgaactcaaaatgatgactaaataaaatgttctataaataggctacaacaaagtcatttttgattcagtaatgctcagataaacggtaaataacgttagatttttaaacttattaaaaagaaattcataaaagattttagaaattaatctgaatatggctaagtcatattatattgccagatttaaatattacgattttttgtttatagtcagctttttataaatctattgaattcgacagaaataatgaactttaaaatattaaatcagaatattcttatgagctgcttactagccagtttctttctcactggttgtgtgagtaatcgaattattggtgaaaacacgcgagagctatttacaaaatacgactcaggctatgaatggatcactttaacagaagatgatgtaattgcattcggtaaaccatcagtatctctcccaaatgaaccagaggacagtattgttatcgcagggaaaaaatatagttatgtcattagtaaaggcggtaacgatttcattcaattaattagtcaattaaatccacaatatattcaaataagtaatgagctagattttaatgctccagcttcgaatagtaaccatttttacggacatattagattttcttacaccccacctaatgggaaattgaacgagaaagaatcagctttattcaaacaatatggtgtaattccatgtgactatgaaaagacattagaactacataaatttgagttaaatcttagaggaactgtttatcctcctgtaaacaatcttaaaaaaataacccctttatccaagccatatcacgttagaatccaatatcttcatgataaaagcggaaaagtacccttatcaactaaggagaagctagcaagtttaccactgcttccgtttaccttaactttcgatattattgctttacctgcgaaagtcatgggtatcatttaccagccttaatagattaggaataaaaattacaaatttcagtaaagataaaaaatccccgctcaatgcggggatttttatcaattttctaacatttcttttaaagaatcgactaattgcggaaattccgtataaccttcccgacctaaaaagtgcccaccattaggaacggtaatataaggcgcatcaatatccttagccaattgaatcgttagttgtggtggaaccaaatcatcattatcagacaaataaaccagctttttctttatgtcacggaaatagttggtgtcgactttactctttgttatataaggactaagaggtgaagagtctgaaattggaccagagaatccagatactaaaatcattcctccaatattttgataatcatgtctttgtaaaaagtgtagcaaggtaattacccctaaactgtgggcaacaaaataagtattttcattaactgcaggaatctgctcatctaatactttctgccaagcatcgacgtccggatgctcagaatctggaaatggtattaaagtaacagttgtattttcatcttctatttgatgttttaagtccaaaaaccaatgatcgttaatagaagctgagtaaccgtgaagcacaaatatttgacgcatgttcttctcctgtaattcaagggttttggcatttgtaacaaatgacattaatccaaatatcaccaataaaatgagttttctaatcattgaacaagtaccattttgaaatataaaaacatgctaaactatgacaccactgttaaggtcaacccatattttatgaacctagctaaagtttccgagctcacaaaagtaagcccacgtatgctgcggtattatgaaaatttagggcttatacagcctcatcgagcgagtaataattatcgaagttatacgcaaaaagatattgaaaatattaagaaaattaaaatattaaatgacgcaggtatgaacctgaaagacattcatgttttattgccatgttttgatttagatgaacgggtatttacgctgtgtccagtggttcaagaaaaactgcaaacagaacttaagcatgtgtccgatcagttaaacaaactgcaaacttctcaaagtttattacaatctttcttggcaaaaggaaaagctgagagcaccaatatttaaaagtgatgcccctcctatagctattcttttaactctccttccaaggcagctacattctttttcttaattttttcaatttttgcattaagttttaaaacgtcttgatacagtgcattaaactttttgacctgagcattttcatggaaaagtatcatctgatctttcttttgccatggataagtttttaaaagcttaaacatttcttctgctttatctaaaatttgtagctcaatcataaaaattgcatggtcctgatcggctttttgctgagctcctaattttatttcgaggatttgtctcatctctttatcaacagacagttcctgaatttttgccaagaaggttttatgaattttttcatattcggattgatacttatctgaagctctgcgaacatcggctagcattttttcggtttcagcatatttttgttttttatcatgatctaaacggtcaacatttaaaaacgtatcccatttcgcagcttttaattctcttaaatattcattacgtgcatttacattttggacccaataactcaaaagaaactctgagacttgtttgtagtgtcctgccagccgtttatcgtgaatatcaagttgtacaggtttagtccagtcttgggcctgatcataaagctgattcattttttcagtcattaccacatcaaacatttgactgctatctttggcttgctgctgttttatatgttgataggtaaaaaaaacaatactcgtaataacaaccagacttgcaattgcaatcaaaactcggcgcataaacacctcctatttccattcttatagttttgctctttatagttataaaatagagcttatagttctttatatgccatttatttcacaatacgcaacactctattctccattcaatgctttaaatccgtgtacatcatccctattatgatgagtaaattatatttatgagattctcccatgcgtgttgatgtctggtctgatgtagtatgccctttctgctatatcggcaaaaaacgccttgaacatgtcgctgccgaggcaggtatcgagcttgatattcactggcatagtttcgaactagatcctgatgctcccgcaaaacatgacacttcaaatactgagcgtttggctaaaaaatatggccgtacctatgaagagatggaagaaatggaacgcaacattgcggccatggctgcttctgaaggtattgacttccaatggcaaaaagccaattcaggcaatagctttaatgcacaccgtattatccaccttgcacaaagtaaaggtttaggaaacgaagcaaaagaagcttttttccatgcttatatgactgaaggtctagctattggcgaacgcgaagttgtagaagaaattgcttctcgtattggccttgataatgccgaagttgaatatgtactcgatacaaatgagttggctgactttgttcgtcatgatgaaaaaattgcacatgagcagctcaatgtaactggcgtacctttttttgtatttgaccaaagaatcgcacttgcaggagcacaacctcgtgaagtgtttttgcaagtactagaacaggcacagctcaaggcaaatgctgaaaatatcgagcaagatgacgcagctgtttgcaatgatgaaacatgcgatattccacaaaataaataggtttaacgataaagtgtgaacaagtcgtatgttttatcaccattttagcaatagagcgttctaaaaaaagaactattcaattgtttaaaatcggtttatgattgcgacttagaatattcgcgctgtaatgttctgttttttatgtgtttaatgatcggaatttgaagtttccttgatcaaaaactccccctagtttgggggattttttttgcttaaaaattatcgctaatagcttaaactttttaattaatttcaaatatgtaagaaaagttaaatttacttaagttttgtgtcgtcctcttgattttattagaaaaatctacaaaagtgacaataacaacaaaacataaagatagatatgaaaacatttcacatcattacatatcggcagctttttgcccttttgaccttaggatttggttcagtatgtatggctcatgcagaagtaaattcttcctcaacccaacaagtaaacggtttgtcatctggagcacaaactgaagaaaataaagatgaaaatcttttagaccaaattccaagatggattgatgcaaccccaacgattttccccgagcagtccaacgaaccgattgttccaccaaccgagcaaacagaagatcagacttggtttgaccgtaaacaaaagaaaatccgtaattgggccgatcgtacatctggaaaaattgataattggtttggtgaagttgacccacaaaaacccgcgtcagccaccattcgagtcatgatcgataactattggaatgaatatgataattatgaaatcaagcccagaattcgcggtaagattaaattacctactctagagaagcgtttaagtgtggtatttggtgatgactctttagatgacgaatttaataatagcccagccaatatcaatcaaaacccaaatcaagatccaaataaaaagttagatggtaaacgaactcgagatgacaacagctcaatcgcattacgttggtcaaatttctcgaaaaagctaccttttgaaacagacgctgacttaggtatccgttctggcgatgatatttatgtccgtttaaaagcatcgagagactggcaactccgtaatgattttaaattttatgcagaacaaatttatcgttatggcatagatagtgaaaactacttacgaactaatcttgaacttacccatgctcgtccaaatcagccgatcttatcaaaccagttcagcttaacttatgccgatgatcaagatgacgatttgacatgggaaaaccgtcttttccgagaacatagcttctttgcaaataaccgttttaactatggcatttatacaggtggctactacaatgacaacgatttacgtttaaacagttggggaccatttgtatcatggcgtcagcctgttttacgtgaatggttctttgtacaaggcgacctcaattactttaatgaccatcgtgaagatcgcaaccattatgtgagcacattcttacgattagaagcccttttctaagcttaaagatcaccttggattccccatccaaggtgatgaataataaaatacttttaaataaaaatttaagcttttcttcttacaataacgagctaatttttgattcctgatcttcagaaaaatgaatcaattctcttctttttcatttgaatatagatctactgccttactttgcatttatagcttaggtatgctggttttaattcctcatatacagctttttcctacttctttgaaacactcacgctctacaaggcgaaccctgtattcgtctgtggttactctcaaaacaaaaagtcagtctgtatcttttttacattcaccatgcgaagtagaaccaagtcatagttcagataccgcacttattcaggacctgatggctgtatttggaaatgatacgttgtggagtcgcgcagcccaacataaacatccttataaaacctttggcaagatcaagaagaaagcttcaactcctcatgtttcagaaaataatccgctcacagcaagttggaataccatttcaacctggatgccatttgaaaatgatcttgatctaggctcaaactcggaaagtgatgtttatgtacaatttcttgccaagaaaaaatggaatttacgacataacattagtctagatactgaacaaattttccgatatggttcgactagccggaattacactgaaacgacgctgaacttaacgcagaaaatgcaagataacacattattttccaatacatttaatgtaaataagagtggaaaagaagattacaactgggggaattggactttccaacaatttgaatttgtaaaagataatcgtctgacttacggtatttatagcggtggtgtatatgccaataatgatatccgcctaaatagttggggaccttatatttcatggcgtcaaccgatatggagagattggatttttatgcaaaatgatcttaatttctttaactatcttgatgatgaccccaagcatcagctcagtgtccaaatgaatctagaagctaatttttagacaaaaatcatcaaattgtggataactctttctttatccacaaaaaagcccctgataattcagaggctttttctattgcaaaattattttagcaacaagctattaatgcgcttcacataagctgccggatcttccggtaatccaccttctgcaatcaccgcctgatcaaaaatcacattcgccaaatcatcaaattgttctgaaccttcaagttttttcactaaaggatgctcagggttaatttctaaaattggcttgatttcaggtacggcttgccccgcttgtttgagcatacgaataagttgaggagacaattccccttcactagtcactaaacatgccggagaatctaccaaacgagtcgttacacggacttctttggttttagccttcaatgagtcacttaatttctcaacaacaggtttaaactgttcagccgcttgctcaagtgcctttttctcttcagcatcttgcaagtcacctaaatcaactgcacctttagatacattcttcaatggtgtaccgtcaaactcgtgaacaaagttcattgcccactcgtcaacacgctctgccattaataatacttcaatgccttttttcttaaacaactccaactgtggagagttcttagcagcagctaaactttcagcagtcacataatagatagctttttggccttctttcatgcgtgccttatagtccgcgaaagaagttgttacttcatcatttgtggaagttgcataacgtaataattttaaaatacgttcgcggttaccgaagtcctcacccaaaccttctttaagaactgagccaaactcagtgtagaacgttttaaatttttcttggtctttctcatcttcagatttagctaagccatcaagcaaagtgagtacacggcgtgcgttaccttcacggattgtcttaacatcacggctttcttgcaacaactcacggctgacattaagcggtaaatcagcgctgtccacgacaccttgtacaaagcgtaaatagtttggaattagattgtccgcatcatccataataaatacgcgttttacatacagcttaattcctgcttttgcttcacgtgtaaaaatgtcatgaggtgctttacttggaatataaagtaactgggtatattccgtactaccttctacacggttatgtgcccatgcaagcggagcttcaaaatcgtgagttaagtttttatagaactcaacatattgctcttcagtcacttcactcttgttacgtgtccatagtgcacttgccgagttaattgcttcccactcatctgttttgaccatttggccgcctttaggctcctcaccttcagcaacctcttcttcttgccaaacttctttttgcatttcaattggcaagctaatgtggtcagaatatttattaacgatttgcttaactttataagactctaaataatcaagcgcatcatcacgtaagtgaagaataatgtcagtaccgcgtgaagctttatcaatttgctgaacttcaaactcacctgtgccaccactaatccaacgcaccccttcagaagcatctagacctgcgcgacgtgattcaactgtaattttatcagcaacaataaaacctgagtagaaaccaacaccaaactgaccaattaactgagcatccgctttctggtcacccgtcaattttgacatgaaatctttagtacctgattttgcaatggtacccaagttatcaatggcttcttgttggcttaaaccaataccgttatcagaaatcgttaaagttttatcttctttatttaagctgattcgtacatgtaaattaggatcattttcataatattcaggatgattaattccttcgaaacgcaatttatcacaagcatctgatgcattagagataagttcacgtaagaaaatttcagggtttgaatagagagaatgcgtcactaaatgtaaaagctgtgctacttccgcttggaaactataattttgtgatgcttgttcactcataaatcactccttaaattttgaagtctgtttgttctagaatgctttatgaatggagtacttctagaatttttcaatcctgaatattaaaaaatttttctctaattaaaatggtccatggcttaagaccctatcttgtaaaatagtgtctagttgtttttgtctttgttgatatgccttagaaatacaactcacattagctgcacaagcatttctttttttcagccattgctgctgtgtatctttttgattatcacgtccacccattggtagtgcatgtaaaacaatttgatatgtcgttgccattttgacatcggcatcatttaaagatcggttcttacaaatactgagttcagtctttgtttttgcagcattgcaagagaaactagcagcttgcaaactatgcgtaaaagctaaaccactaaaaagtgctagccccatggcaaattttctattcatcatgttattcctttaaaaatgtataaaaaatagtttagaaataaagagcggtaaaatatgtataaaactgtctattttatgcgttttttagtgagaaccatgaaataaaaaacctcacataaaaagctatgtgaggtgcctgaatctaggtttattattatattctttctatttattattatgcttagaatttatagctataacctaaagtgtaaacaaacgggttaatatctaagtcaaatttagcaccatttgttaaagtaacttctggactaatatctgcataacgaacatctacaaatactccccaatttttagcatcagcaggttggaaattaaaaccaacttggccagctacaccaaaatcttcttttactttgtcagctacgccttgttcatcccaaggaataaatgctgttgccccgataccaatatacggtgtaaaacgagtcgagtttttaaaatgatatttcgcggtaattgttggtggcaattgtttaatacgcgctactttctgaccatctaataaaacatcatgattaaccggcgttgctaataataattctgccgaaaatggagtttgaccaaaaaagtattctactgatggagtaaatgcatattcatggtctgcctttaccacacctaaagcagttgttgtgtcttccgatggagcaataacgctacccccaaattttacttgccaattaccagcaaaagtaaatgaagacacccccattaatgcaacaactaatactttcttgaacactttaatatctccaaccttatttatatttataataaacatttattttaaattgatgcaacacccattataaaattatttttatatttatttttaaataactgttttaaataaaattatatattaaccaactattttaattggtttttattccaacctaattaatcagaattgttttatataaccaacctttttaataaactttaaatcccgagtattttaatatagtttattccaaatacatgttttgtttataccataaaaaaacctccttaattattatctctagataaaaactaaggaggtctttatttaatattttataaaaattataaaaccatggctgcaatccaaccaaaaattaatagcggaatattaaagtgaataaatgttggtatcacagtatcccaaatatggtcatgttgcccatctacacctaaacctgctgttggtcctaaggtagaatcagaagccggagatccagcatcacctaaagcagcagctgtcccgataagtgcaattgtcgctaacggtgagaaaccgaactggacacataaaggtacataaataacagctaatacaggaacacttgagaaagatgaacctataccaatcgtgacaaataggccaatacaaagcattaaaaatgcagcaagcgcacggttatcaccaatgatttctaccacgcctttaaccaattggttaatatctccggtatgagtcataaccgaagcaaaaccggcagcagagatcataataaagccgactagagccatcattctcatgccttgtacaaagacatcatctgcatcttgccatttaaaaatgcctgccgtagaaagcactgcaaagcccactaaaccacccaagatcattgagccggaataaagctgcgcaactaaagtgagtccaatagccagtaaagccataaaaattgtttttttagcaataacagggccttgctctgcctcatgtttaagttcttctgcgtctgcttttaagtctgctgtttcatcttgtgcagttgcacgaagaggtttatctaaatcaattgtagttacagggcttatcgaacggtcagcataaattcgtggcttacggtaactgataaataccgcaaccaaggtgcctagaaccattcccaaaactggaattgccataccaataggcatcatgccacgttctacatgtaaaccataagcagcaccaattttgttgatatttcccatcaaaatctgttcaaggaaaatcgcaccaaagccaacaggtaagaaaatatatgtcccaaccaagcctaaagtaagaacacaagctgcggcgcggcggtctaattttaaatggttcattacccgtaatagagggggaaccaatacgggaataaaggcaatatgaactgggataaggttctgagagaaaatagctgcgatcagtaaaatacctaatagtaaatatttcactttagtttctcggcttttccccgcttccattcccaataaaccaatcagtttatgggcaagtaaatcgggtaatccagattttgaaagtgccagagcaaatgcccctaacactgcataggcaagtgcaacctcagcaccatcaccaagaccagcgttaaaggcttcaacagtttgagaaaggcttaaacccgctacgaggccgcccacaatggcagaaaccactaaagtcagtacgacagaaacgcgcgccagtgataataagaacatcactgcaatcgcaataacgacagcattcatgaataagttcagagcaaaacaaaaggcgatattctaccagattcacctctatgaagccgaaaatatcgccgaattaccagttttgtatattaaacagtcacttattagctctgcgagttaataaactggcgaatatgagctgccactttttcagcctgactcaaaatcgcccaatgatttgcttcaagctcaacatattcgaagttttcaacccattttggcatcgcttctgtaatatattctgggctgacaaaagtgtcatactttaaaataattgctttaactggacattgcgcataacgctgacgaggacgagttaaacgtggaataaaattcgcacgatataagttaataccgtatttcccatctgaggaaatattactatttaaaggcaaattatcttttcgctctaagtcatttaagatcttaccccacttctctggactaaacagcgaccatacagttggagcaattagcggtaaatggaatgctccgatataccatgattttgtgagtatttttaggatctgtgcaggtgatgttttaaacttctctcttaagaaaagtgccgcatgatccaaacatggaccggaaattgttgtataagagagtaaacggcctttaaatttaggttctgttgcagattcccaagactgaattgaaccccaatcatgcgcagccatatggaactgtcgatttgggattacctcatctacgacttcctgcaaatctaaagataaacgttctaaacggtaatctcgtatccgtttaggaatagaggataagcctgccccacggacatcataagtcacaatataaaaatcattgattaaatgctcaatgaccgattcccatacttcctgattatctggataaccatgcactaacactaatggagtatttttctcatcaccccaagctttggcacacaaggtttgttgatcacttgtcgttacggcataaatctttggctgcataatcatttcctattttgtttttcaatcgatcatgtcgttaatcggataaagcattgccatcaatataaaaaagatgatacttatctagtatgaccagtgttgcaataaaaaaaattgactattatggctattttaaaaaaacttcagaacattccttcaatttccaaattcttatttaaccattacccaccttaccgtggagctggaattcatattgaagtcatgaatttagagctctgtcatgttcgggtaaaaatgccacttacttggaaaaatcaaaatctggtaggcactcactttggcggaagcctttattcaatggttgacccgttttatatgttgattcttatgcatcatctcggatcaaaatatattgtttgggataaagcagctgaaattaattttttatcacctggccgaagtaccgtttatgctgacattcgagttgatttagcagaaatcgaacaaattcgtgaacttgccgaaaactatgctcctgttcttagaacatatcatttaaatattttcgatgaatcaggtgtgagaattgctgaagtccaaaagacactttatatccgacgtaaaaaagcaaagccttctactaataaaataagcgcctgaaggcgcttatttttcatttcacttatttttatttcttttcttcaatcgcagcaccagcaccgccgccgattgcgccaccaattgcagcacctgtatcaccacctatgattgctttaccaacgaccgaaccaatacctgcaccaatcgcactcttggttgtagtttgtttactgccaccttgagtattagaacccacacctgcacctaccgcagcacctaagcctgcaccgataccaccaccaacatggttaccaagaccgccacccaatgcaccacccgctgctgctgcaccaatacgctggtcagacggactcatattttgacagccggtgaacataactgtagataatatgacagtagatattaaaccaatttttttattcatgaccgtactcactcctttgggctttaatcaaagcatagtcttcttttatggggaatttgatcagtttgtgttattgcactgtcgtaattaatagatattttgtaaagccaatttatgcacagtgatgagttaaattttcatcttttaaaaacagataaaaaagaagctcttaatgaaataagagcttcttttttaatatagttagaggtagttttagtacttaccttttttctcttcataggctgcaccagcactaccaccgagtgctccacctgcagcagcaccagcgtcaccaccaatcactgcaccccctaagattgccccaacacctgcaccaatcgcactattacgtactgttttactgctagagcctttagcattagcggcaacaccagcaccaagcgctgctcctaaacctgcaccaatattaccgcctatatgtttacctacggcaccacctgcaccaccaccgatagctgccgaaccaatacgtttgctttctgggctagcattttggcaacctacaaatagagtagttgacattaaaccaacacctgcaatcatcatcatttttttcattaaaagctactcctctactcagttgcgcctagaatagtatgctttcatggagggttttcccccattaagtaataaattaagagtgctttaatagactttttgtaaaaatggcttattttttccacaaaaaaggcgccctaaggcgcctttttaatgcaagtttaagcttagaattgttctgagtttaaagcttggctaaatgcttggtctacttcgctgaagtcattgtgaagagcatgttctgctgcttccgcttcttgacgacgacgctctaagtggtatgcaagaccagtaccagctggaatcaagcgacccactacaacgttttctttcaagccacgtaaatcatcttctttacctgttacagccgcttcagttaacacacgagttgtttcctggaacgatgcagcagagatgaatgagtcagtagaaagcgatgctttcgtaatacccatcaattgacgttcaaacttcgcagggaacttgttctgcgccaagacagcttggttctcttgaacaacacggatgtaatccacttgttcacctttgatgaagcttgtatcaccaccatcgatgatatcaactttacgcaacatttgacgtacgataacttcaatgtgcttatcgttgatttttacaccttggagacggtaaacgtcttgaacttcgttcacgatgtagttagttaaagcaacttcacctttcaagcgtaagatgtcatgtggattttgtggaccatcagaaatggtttcaccacggttcacatgttcaccttcaaacacgttgatttgacgccattttggaatcaactcttcgtaaatttcagaaccgtcatctggagtaatcactaaacggttcttacctttggtctctttaccgaagcttacgataccagacacttctgccaagatcgcatgttctttcggcttacgtgcttcgaacaagtcagcaacacgcggaagaccaccggtaatatcacgagtacgtgaagattcttgtggtacacgaccgataacgtcacccacaccaattgtttcgccgtcgcgaacagtcacaattgtgttttgtggtaagaagtagaactgttcaccgccatcagttgtatctaatacgattgctggacgtaaatctttaccagaagcaggacgtgctgttacaggcaagatttcaacagttgtcataccagttgcatcatcagttttagatgttgcagttacaccatcagcaatttggctgaaacgtgctttaccagcaacttctgttaccaatggatgcgtatgcggatcccatgtcgcaacgataccaccagcctcaacaagctcaccatctttcaacaagatgctcgcaccgtaaggaagtttgtagcgttcacgctcacggcctaactcatcggcaataccaatttcacctgaacgtgaaactgaaaccaagtggcctttcgcatgttgtacagtttttacgttatggaaacgtacagtacctttgttacgtacttgaacactgtttgcagcagaagttcggcttgcagcaccacccacgtggaacgtacgcattgttaactgtgtacctggttcaccgattgactgtgcagccattacacctactgactcacctgggtttaccaagtgaccacgagcaaggtcacgaccataacatttcgcacatacaccgaatgttgattcacatgcgattacagaacgtactttaacttcatcgacaccagcctcttcaagctgagccgcgattttctcgtcaattaacgtaccacgaggtaatacaacttcatcatcagatgcacgacgtacatcttcagcagttacacgacctaatacgcggtcacgtaatggctcgatgacatcaccaccttgaatgaatggagtcatcactagaccaccacttgtaccacaatctggctcagtaattactaagtcttgtgctacgtctacaagacgacgagtcaagtaaccagagttcgcagttttcaatgcagtatcggccaaacctttacgcgcaccgtgtgttgaaatgaagtactggagtactgtcaaaccttcacggaagttcgctttaattggagtctcaataatcgagccatccggttttgccatcaaaccacgcatacctgcaagctgacgaatctgagccgcactaccacgggcaccagagtcagacatcatatagatactgttgaatgatttttgcttctcgtcttcaccttgtttgtttttcacaagtgtataagacaagttatccatcattgctttagcaacttggtcgtttgtacgcgcccaaatatcgacaactttgttataacgttcaccagcagttacgaaaccttgttcgaactgttgttcgatttcacgaacttctgtttccgctttgtcaataattgtgtgtttcgtaggtggaattaacatgtcttccatacctacagatacacctgaacgagtcgcttgacggaagcccaagtacattaattggtcagcgaagataactgtatctttcaaaccaagtttacggtagcaagagttgattaacttagagatgttctttttagtcatctcaaggttgatcatgtcaaagcttaagccttctggaacaacttcccaaagtaagcaacgacctggtgttgtatcaacaataatagtttgctgttcacgctcaccattttcattgataaccgtttgatgcacacgtactttaacacgagcatggatcgcaacttgaccagttgcaagtgcacggtttacttcgtgagtatccgcaaacaccatgccttcacctttcgcgtttactgcatcacgagtgatgtagtaaagacccaagacaacgtcctgagaaggaacgatgattggctcaccgtttgctggtgacaagatgttgtttgttgacatcatcaatgcacgagcttctaactgtgcttcaagtgtcaatggaacgtgtaccgccatttggtcaccgtcgaagtcggcgttgaacgcagcacagacgagtgggtgaagacggattgccttaccttcaataagaataggttcaaatgcttgaagacctaaacggtgaagtgttggcgcacggttcaacattactggatgttgacgaattacagatgcaagaacgtcccaaacttccggggtctcacgctcaaccattttcttcgcagctttaatggttgttgcctgacctgaagcttgtaatttcgcgaaaatgaatggcttgaataattcaagtgccattttcttcggaagaccacattggtgaagacgtaaagtaggacctacagtaattaccgaacgaccagagtagtcaacacgcttacctaacaagttctgacggaaacgaccttgtttacctttgatcatatctgccaaagattttaatgggcgtttgttagaaccagtaattgcacgaccacgacgaccgttatcaagcaacgcatctacagactcttgtaacatacgtttttcgttacgtacgatgatgtccggcgctgcaaggtcaagaagacgcttcaaacggttgttacggttaattacacgacgatataagtcgttcaagtcagaagtcgcgaaacgaccaccttcaagtggaactaatggacgtaaatctggtggaagtaccggaagtacattcattaccatccattctggcttgttgtttgagtctttgaatgcttccatcaatttcaagcgcttagacgcttttttcaacttcgtttcagaagttgtttgaggaatttcttcacgtaaacgtgaaatttcagcttcaaggtcgatgtctttcaacaagtcttgaactgcttctgcacccatttttgcaacaaattcgtcgccgtgctcttctagagcagtaaagtattcttcatcattaagaagttgatacttttcaaatggtgtcataccaggatcagtaacaacgtatgattcgaaatacaatacacgttcgatatcacgaagtgtcatatcaagtaataaaccgatacgggatggtaacgattttaagaaccagatatgtgcaactggagaagcaagctcaatgtgacccatacgttcacgacgaacttttgctgtagttacttcaacgccacatttttcacaaatgacgcctttgtatttcatacgcttgtatttaccacacaagcattcgtaatcttttactggaccaaagattttggcacagaacaaaccatcacgttctggtttgaacgtacgatagttgattgtctcaggttttttaacttcaccatgagaccatgacttaatcatttctggtgacgcaagaccaatacggatacggtcgaactcaactggtgcatgaccatctgagtccgttttcttacgcatgatatcgagcaagtctttcaatttttttctccgtgtgtcgggaagcctcgcttacccgactgggtcacaaatattgtttttacctaaaaaatcgtgagtcttacgacttagtcaccattttttagttcaatgttgatacctaaagaacggatctctttggtcaatacgttgaacgattcaggcatacccggatccatataatggttaccatctacaatattcttatagatgcgagtacggccttcaacgtcatccgacttcactgtaagcatttcttggagtgtatatgctgcaccgtatgcttcaagtgcccatacttccatctcaccgaaacgctgaccaccgaattgtgctttaccaccaagcggttgttgtgtaacaagtgagtaagaaccagttgaacgcgcatgcatcttgtcatcaaccaagtggttcaatttaagcatgtacatgtaaccaacagttactggacggtcaaactgttcacctgtacgtccgtcaaacaatactgtttgaccagtacgtgaaatgtcagccaattcaagtaagtctttaatttgactttcttcagcaccatcaaatacaggagtagctaaaggcacacccgcacgcaagttacctgcaagcgctagaatttcttcatcagtcaagctatcaagatcttcttgctcaccgccgactttgttataaatcttgtctaagaattcgcgcagttctaaaactgtacgttgttctttcaacattttttcgattttgtcaccaagccctttagccgccatacccaagtgagtctctagaatctgacccacgttcatacgagatggtacacccagcgggttcaatacgatatctaccggcacaccgttagcatcatgtggcatgtcttcaacaggtaagatgttagatacaacacctttgttaccgtgacgaccagccatcttatcaccaggctgaatacgacgtttaacagctaagtaaactttaacaactttcaatacaccagttgttaattcatcacctgttgcaagcttacgtttcttctcagcgaatttctcatcgatttctgcgctcttctctttcaagaacacttgaatttgagttaaacgctcagcgattgcttcatctgctggttgaatttcaagtaagtcaacaagctctaaaccagataataaatcttcagaaagtttatcaccacgtttagttgaaccaccgccattagactcttggcctttaagcaaacgaattacacgctcacgagccgcttcttcgaagatcttgtattcttctttcaagtctttacgataagaatcaagctgtgctttttcaattgctaaagcacggtcatctttctctaagccatcacgagtgaagacttgaacgtcaataactgtacctttagtaccagatggaacacgtaaagatgagtctttaacgtcagctgctttctcaccaaaaattgcacgaagcagtttttcttcaggagttaactgagtttcacctttaggcgttactttaccaactaagatgtcaccagcagtaacttcagcaccgatataaacgatacctgattcatcaagtttagaaagcgcagcttcacctacgttaggaatatcggcagtaatttcttctgcacctaacttagtatcacgtgctacacatgacaattcttgaatgtgaatagaggttaaacggtcttcttgaagtacacgctcagataacaagatcgagtcttcgtagttgtaaccattccatgtcatgaacgctacacgcatgttttgaccaagcgcaagttcacccatgtctgttgacggaccgtctgccaagatgtcaccacgagcaactttgtcgcccaagttcacgataacattttggttaatacaagtattttggtttgaacgcgtatatttgatgaggttatagatatctacacctgcctcacctgcaaccatttcatcttcgtttacacgaataacgatacgagaagcatctacatattcaattacaccgccacggtttgcgattacacacacaccagagtcacgtgcaacgttcgcttccatacctgtacctacaagcggtttatccgcacgtaaagtaggaactgcctgacgttgcatgtttgaacccatgagcgcacggtttgcgtcatcgtgttcaaggaatggaataagtgatgcagcaacagatactacctgctgtgcagaaacgtccatatgcgttactttttcaggcggcatacgtacgaattcaccttgatgacgaacagaaacgaattcttctgttaagttgccatctttatctacagcagagtcggcctgtgcaataacagtacctacttcttcaattgcagataaatattcaacatcatcagttacacgaccatctacaactttgcggtatggtgtttccaagaaaccgaagtcattcgcttttgcgtatacagaaagcgagttgatcaaaccaatgtttggaccttcaggagtttcaattggacaaacacgaccatagtgagtttggtgtacgtcacgtacttcgaagcctgcacgttcacgtgttaaaccaccaggaccaagcgcagatacacgacgtttatgtgtaatctcagataatgggttgttttggtccataaactgagataactggcttgaaccaaagaattctttgattgcagcagcaactggttttgcattaatcaaatcttgtggagacaagttatctgtttctgcttggcttaaacgctctttaacagcacgctcaacacgaactaaacctacacggaattggttctctgtcatttcaccaacagaacgtacacgacggttacctaagtggtcgatatcgtcgacttcacctttaccgttacggatttcaaccaatgtacgtaatacatcgataatatcttcgtgcgataaaataccttcaacttcgcgtgacttctgatcagtaccaacttcgtaaggacgacctaaacgacggttgaacttcatacgacctactggagataagtcatagcgttcagaagagaagaacaagttattgaataagttttcagcagcttcttttgttggtggctcgcctggacgcattactttgtagatttctactaatgcttcttcacgatcacgcgtcaagtcagcacgtaatgtatcagctacgaatgaaccacggtcaatatcgttagtgaacaagatattaaattgcttaacaccaccttctgccaacttcaccattacttcatggcttaacagagtatttgcagcaattacttcaccatcacgtagagtaatatcttcagcagtgatacgctcatataagtattcatcaggaactgaaagcttagttaaacctgcagcttccatttgacgtacatgacgagcattaatacgtttaccttgctcaacaatgactttaccttcattgtcagtaatatcaaattgagccatttcaccacgtaaacgctcaggtacgaggtcaatttgatagctacccatgtcaagatacacaggtactttttcatagaacaaattcaagatctgttcattgttataacctagtgcacgtaacacaactgtagcaagtaatttacgacgacggtcgatacgtacgtaaactaagtcttttgcatcaaattcgaagtctaaccatgaaccacggtaaggaatgatacgtgctgaatacaacactttaccacttgagtgggtcttacctttatcatggtcaaagaatacgcctggcgaacggtgtaattgagatacgattacacgctcagtaccgttgataacaaaggtaccattttcagtcatgagtggaatttcacccatatagacttcttgttcgcgtacgtctttaattgatttagtttcgcgatctttaataatcaaacgaattttaacgcgcattggtgccgcataagtcgagccacgaagaatacattcgcgtacatcgaactcaggtttaccaaggctatactcaacaaattctaaagcagcattgccagaataactttcgataggaaaaactgaacgaaatgcggcttggagaccgatatcttcgcggttttttggtgatttgccatcttgcaagaatgttctgtacgaatcgacctgaatcgataataagtacggtgcatccattacttggggcaatttaccaaaattcttacggatccgtttcttttcggtatatgagtatgccatctggagtcctcggaaagtaaaccaagcccgcctgcagaacgggctcagaaggaattacgcaggccgatatggccaccactgtttacaaatgctgcaatttttagtggtataaaaacgcttaacaatatttttaaaaatgaaaaatattggtaagcatttgaatttatttattttatttaggctttctctaaaaaccaaacaaaactaacaaaaatcgagccgattattgtaacgcaaaaaggctgatgacccaagagccatcagccattttatggagccgatttaaaaaccgactccttttacaattacttaagtgtaactgtagcaccagcttcttcaagtttcttcttaagttcttcgccttcttctttagaaacgccttctttaagaacttgaggagcgccttcaactaagtctttagcttctttaagaccaagaccagttgcttcacgaacagctttaattacagctactttgttagcaccgaaagaagtcaactcaacgttgaattcagattgttcttcagcagcagcagcagcgccaccagctggagcagcaacagctacagcagctgcagatacgttgaatttctcttcgaaagcagaaattaattcaacaagttcaagaacagttttttcagcaactgcatttaagatttcttcgttagttaaagccatgagaataactccaaatggatattgaatggtgtgtaaaattgattaagcagcttctgactcgtttttctctttgagtgctgtaatgaggcgacccaatttcgaaataggagcttgaaggacagaggcaagcatagtaagcgctttctcttggttcggaagattagcaataacgctaacatcagcaccttgataaactttgccgtcaaatgcagcagcttttaattcaaatgctttgttagttttagcaaattcttcgaacaagcgtgcagctgcacccatgtcatcttcagaagttgaaaaacctagaattgttggaccaacaaggttgtcgttcaagatatcaaactgagtaccttgaaatgcgcgtttagccaaagtgttacgtacaatacgtgtagttacacctaacttacgagcttcaacacgaagtgttgttaattgctctacgcttaaaccttgatagtcagcaacaacggctgcaaacgctttagaagcaacttcacttacttctgcaacgatctgttttttgtcttcaataagaagagccattgtaaaacctcctaaggtgatttatgtacccaatgggcacactcccagttcgtaagtctttcgacttacacgcggaggaggaacaaatcacaccaccgcgtctacgcaggctggtttattaagaaaatcgctattcgaaaataacgtcttttcgcctgaggtctttgacgctgataaattctcatttatcaattcaaagtccgcctgataagtaatagataaagctttactctaccgaagcaaaagcagaaataacttttctgttttatgcttaatcctcatcaggactttaaaattctttacttaaccaagttaaaacttagttagaaacgttgtttacatcaacagtaagaccaggacccatagttgagctcaaagtgatcttcttgatgtatacacctttagaagttgcaggttttaactttttcaagtcagcaactaaagtttcaacgttttgacggattgcagcagcatcaaagccaacttgaccaatcgcagcgtgaataatacccgctttgtctacacggtaacgtgcctgaccagatttagcgtttttaacagcgccagcaacgtcaggagttacagtaccaactttagggtttggcattaaaccacgtggaccaagaattgtaccgagcttaccaacaacacgcatagcgtcaggagcagcgattacaacatcaaagtcaaggtttccaccttggatgctttcagcaaggtcatcaaaacctacaacatcagcaccagcttctttcgcagcttctgcttgcgcgccttgagcaaatacagctacacgtacagttttaccagtacctgcaggtaatgtagtcgcaccacgaacaacctgatcagatttacgtggatctacgccaaggtttacagagatgtctaaagattctttgaactttgcagcaggcaagctgttaagaacctgtactgcttcttccaaagtgtaaactttgttcgcttcaacagcagcagcaatggctttttgacgtttagttaactttgccatgtcttatagctccacttccaagcccatagaacgtgcagaaccagcgatggtacgaacacgcgcgtctaagtcagcaccagttaagtctggttctttagtagtcgcgatttcttctaattgagcacgagtcaacttaccaactttagttttgttaggtacagatgaacccttttggataccagcagctttcttaagaagaatagaagctggaggagttttcatgatgaatgtgaacgacttgtcgttgtacacagtaatcactacagggattggaagacctggttcaactttttgtgtagcagcattgaattctttacagaatgccatgatgtttacaccacgttgacctagtgcaggaccaatcggtggagatggatttgctttaccagctggaacttgcagcttgatatagccgtcaatcttcttagccattttaaatacctctgggtacaaacgccgttaggctccccaatttctacgtaacaatactgttacaacaacaatgcccgataaaatcgggcgcttttcaaccaattaagattaaatcgttttttcgacttggcgaaattcgagttcaacctgagttggtcgattaaacacgttaatcgtcaacgttaaacgtgacttatcgtattgaacctcttccaccacacctttaaagtctgtgaatggaccgtcaataacaagtaattcttcacctggctcaaacatcgtcttaggacgtggggcttcaccagtattacgtacacgcgcaagaatcgcatctgcttcacgttgagtgattggcgcaggtttttcaggtgtaccaccaataaaacctaatacttttggacactctttaacaatgtgccaagtatcgtcattcatttccatttcaactaacacatagccaggaaagaatttacgctcagatttacgcttcttaccatccttcatttctaccacttcttcggtaggaacaaggacatcaccaaagctatcggcaacagcgctacgctggattcgttctttaagtgaacgcatcacttgtttttcataaccagaataggcatgaataatgtaccaacgtttcatagctcttttacccgataatcaacttaattaaccaacccaaaccatagtcaaaacaccataaaactaatgatgcaacaactacaaccaatagaacctgccacgatgttgtgactgtttcttgttttgttggccaagttactcgacgcaattcgactcgtgcatctttcagcaaacgaacgaagcctttaccttgatgggtggcgtataataaacctaaagccacaacgatacaagcaaaaattaccccaacgcgcacccaaacatcatttgcaggggcccaatacgctggtaaatgctgattcaccatggtagccgagagcaataatgcaattgctatcacccatagaacgatatctaaaggcgaaccagaacgaacaacttcagcagaattatttctttgaggaattggcgcgtcgctcaatgcgtcacgcgatttatcattcgacatttttgtactcgtcgtagaactcgcgacttattatatgaacaactaagccagcatcaagctttttatttcaaaatatggcaggtcaggagggactcgaacccccaacattcggttttggagaccgacgctctaccaattgaactactgacctataaagcaagttgagagccaaagctctcaacttgagacgtaattcgtcactatattatgcttatgcagttactttagcaacaacaccagcacctacagtacgaccaccttcacggatcgcaaaacgtagacctgggtccattgcgattgggtggattaattctactgacatttcaacgttgtcacctggcattaccatttcaacgccttctttcaactggatcgcaccagttacgtcagttgtacggaagtagaactgtggacggtaaccatttaagaatggagtgtgacgaccaccttcttctttagaaagtacgtatacttctgcgtcgaatttagtgtgcggcttgattgtacctggtttagcaagtacttgaccacgttgtacttcttcacgcttagtaccacgaagtaagataccacagttctcacctgcacggccttcgtcaagaagtttacggaacatttctacgccagttacagttgttttaactgtatctttaataccaacgatctctacttcttcaccaactttgatgataccagcttcaacacggcctgttactactgtaccacgaccagaaattgagaatacgtcttcgattggcatcaagaatgctttgtcgattgcacgctctggctctgggatataagagtcaagtgctgctacaagagcaagaactgattcttcaccgtaaggaccagcttcaccgttaagcgctgcaagagctgaaccacggattactggagtgtcatcacctgggaagtcataagtagaaagaagttcacgtacttccatttctactaattcaagtaattcttcgtcatccacaaggtcgcatttgtttaagaatacgatgatgtaaggtacacctacctgacgagaaagaaggatgtgctcacgagtttgtggcattggaccgtcagttgcagcacatacaaggatcgcgccgtccatctgagcagcaccagtgatcatgtttttaacgtagtcggcgtggcctgggcagtcaacgtgtgcgtagtgacgagttggagaatcgtattctacgtgtgatgtattaattgtaataccacgtgctttttcttcaggtgctgagtcgatttgtgagtaatctttcgcttcaccgccgtaagtttttgcacaaattgttgcaatcgcagcagttaaagttgttttaccatggtcaacgtgaccgattgtacccacgtttacgtgtggtttattacgttcaaacttggctttagccatgatgatcttcctcgtttacgtcgaaccacctacaaatggcgctgagctaactcagtttatcgacatatcgcctaaaaaaaactagacacctaatacttgaaaagcagactatatagcctgctttttgaaaactttgtggaaatccacattaaactttaatatctggagctcttatcgagatttgaactcgagacctctcccttaccaagggagtgctctaccactgagctataagagcgactatccttcgatggagcgggagacgaggatcgaactcgcgacatgcagcttggaaggctgccgctctaccaactgagctactcccgcaacgttggtaataaccacttcactcgaagtttagagatggtggtgagagaaggattcgaaccttcgaagctttcgcaacagagttacagtctgccccctttggccgctcgggaatctcaccaatatcgcacttatctacagtgccgttctttactcaatcaactcaacactttaaaatggtgccggcacacggattcgaactgtggacctactgattacaagtcagttgctctaccaactgagctatgccggcgtttcttagtgtttcgtacgtttcgtatcggaacggtgtgcagtttagcaaaacttccaaacgatgcaagcggttttttaaaaaaaaccgctaaaaactcataaaatcaatccgtttgatgataattcaaccgctttgatcactgcgcgagcttttatttgggtttcattccactcagattctggatttgagtcagcaactagccctgcaccagcctgtacatacacctttttatcacggataacacaagtacggattgcaatcgacatatccatttcaccatgccatcccaaataaccaacagccccgccaaaaactccccttttcacaggttctacttcatcaataatttccattgcacgaatttttggggcacctgataacgttcctgctggaaaggtggctttaaatacatcaagtgcatcgatatcatcacgcacttcaccttgtacatttgaaacaatatgcatgacatgtgaataacgctcgatcaccatttgatccgtgacttggactttacctattttcgatacacgccctacatcgtttcgcccaagatcaatcagcattaaatgttcagcaatctctttttcatcagacagcaaatctttttctaatgctatatcttcttctttagttttaccgcgcggtctagttcctgccaaaggtcgaactgtagcaataccattttctaaacgagataaaatttccggtgatgagccaacaatatgaaatggttttttatcagtaatcgtttgcccttgaaccaagaatagataaggtgatggatttaaatgacgtaatgcacggtaaacctgtaaagcttctccatcaaaatcagaaaccatacgctgcccaggtacaacctgcatcacatcgcctgcacggatatactccttaaccttctctaccgtctctaagaattttgctttaccagtaattgattcaaaatgcggaggcgtatgtggtcgcgcttgcaaactaactggagtcgccaacaactgttctaattgatctaatttttgttgagcgtcttcataagcattactctgctctgtatccgcatgcacaattaaaaatagcgtatctttaagattatcaaaaacaatgactgtctttgagagcatcaaccataaatctggtagcgtaatcggatcagccgcaggtacattctttaaacgtggctcgatgtagcggacagcatcgtagcccaaataacccaccaaaccgcccgtaaagcttggtaagtccggtaagagtttagccgcaggaactttaaattgtttttggaattcacggatatattggaatgggtctagacaattttgctgtgttactgatccgtcagcatgttgtatagataaaacaccagcgttacaggaaaaaactgttgattcgcctaaaccaatcatagagtagcgcgcccagttttcacccccttcaacagactcaaataagtaagcctgtgtttgatccttaaaacgagcaaaaacagataatggggtttctgtatccgctaaacgttgacgataaacaggaatagtattgtaaccagcagccttaagttgctcgaattgcgctaatgttgtcatgaatcttctctaatatggtttcgatttaaaagtgtgtttttctagattcggtttagacacgccatcgaaaaaccatacgcttattcattcttatctccattttcttcattagacaattaactcagcaagactatcaacaacttgctgaggttggcaatcatagatattctctccatgattatagccatagctaaccacaatacaatcaattccagcacgacgtgcagcttcaatatcattacttgagtcaccaatcatcaatgattgtgaagcagatatttttaggctttccatgcaatgcaataatggtagtgggtgcggctttctttcaggtaagctatctcctccaagtacaacttgaaaataagaagaaagctctagctcatccagtaacccttgagcaagtttgacaggcttattagtcacacatgccattttgatattcaaagtttggcaatgttttaaaaactcaggtacgcctgggtaaatttgagtattcacacacagctccgcaccatatacctctacaaatttctgtaataaaactttatgttgttcaacatctaattttccaaatacatgaagcagaacactctcacaaagttttgaagcccctttacctacccattcccgtatttgtgcttctgttaccaatggccaactgagtgattgcagacttaagttcatagaccgatataaatcggcagcggagtcaaccaacgttccatctagatcaaataaaattaaatcgcgcttacttagttgtgcaacagacattttcttctactcaaaattaaaaaggcatgcgtttagcatgccttgattgtaaaagcaccaacgaattatttaaagaataaccacgccaatacagctaaaatcactaaaataataatggtcactagaccaatagatgcattcttttgctgctctttctcttcagtaacccgagaaactggctcctcaatagcaacaggagtttgttctggctgagcatgaatatccaccccttcaggaatcggtgctggttttggcacagaaacgcgctgaggcattccatcacgactcacttcagtttctgctgcacgctccgcaatacttggcataccttgatcgcttaaatcttgtgtcggtgcagtttgtactggctccacctcaatttcaggtaaatcagtattttcttgtgcaggggcgaaaactgaaaattttaaacttgcgaattgaacaatatcaccatcatgcaactgtttttcttgctcaatacgaatatcgttcacaaacgtaccattcgatgaattaaggtcttgcacccatagcgcttgatcttttaacagcaatgctgcatggcgtcgtgaaatttcagcagcctgtagtaataaatcggcatcttgatgacgtcccaccaacatatcacgatcaacattaatttcttggccagtaaattcaccagtaattgcttgtaatttccaagtcatgcctatgtcctattcattttttattaatcataacatgctactacggcgctgtgcttggacgcagtgtcgttgttgttactgtatttttagtacgattaatttcaggatcaggcaactgtagggtttgcttttggacggtaggttctacagctaccggcgtagttatggtcgaacttttaccacctgatggaacctgttggtaattttttggcttggaggcaatactcggcggggtcattttttggttataaatatcatcaacttgctcaggtaattttgcaaagttgccatttttatccatagccaattgcaagctataaagttgattatagcgctgctgagataaacggcgtacatcatttgcatcgcccacaattgttgggtgaataaaaacgagaaggttacgttttacattgcttctgttatctgatcggaacaatcgcccaacataaggaatactacttaaaccaggtataccttgtcttgaaagcgaagtgtcatccgacaccaaaccacctagcaccacagtctgcccatgctcggctaaaacagctgttttaatagcgcgtttacttgtcaccaagtcagctgcttgcccacggctatcttgaacagcagaaacttcttgctctacttctaaacgaacagtacccccttcaccgatatgtggaacaactttcaaggtcacaccgacatctttacgctcaacagttgtatagggattgatacctgtactattggtagtaaccgaccctgtgacaaatggaacgttctgacctacaacaatataagcttcttcattatccatcgtcacaatggacggtgtcgaaagtaagtttgatttagtattggttttgagagcctgaattagtgcaccatatgccttacgagaattatcaaaattgcccaatcctaaagttgcaccattacctttattagctccattagcgatagcagatgcagctccagccgaaccacccgataaataaccagcagcgatagaagataaactcgcccctacattactaaagctaagtaaaccaatcccactagataaatcaccgagtgcccattgaattccaagttgatctgcatcatctccagagacttcaataattgcggcctcaataagcacttgttgacgacgaacatctagttgttgaatcgctgattcaatttcacgcattaattggggatcagctttaactactaatgagttctgagcattatctgcaataatactcacaccgttttgattaaagctggtgatattattctgattactactgttcgaattaccgtttaggttaattgcaggagttgaaattgaggcaccatttgaacccgatgtatttgaaccagaattctggttattaccaattaaactattaatcggattcgatgagttagatgaattattactattattcgatgaagatactgcctgtcctgtgactaagccttgcaaaatttcagacaagtttttagcactggcatacttcaaacggaaaacttttaagccacctaaacgatctgccgaaggtacatccagcatctcaatcatatgacgaatacgtttacgtgtttgcggatcaccttttattaaaatacggtttgtccgattatcagcaataatacgaatacgggcaccactaaaatctttagatgcgcctgttgcgctcatcgcttcaagctgggtaataatttcttctgcttggctcgactgaagcgtgatcgcttcaatatcattttgcccagttccatccaagttacgaataatattttcaagttgataaatattcgcagctctatcagaaacaataagtgcattggttcctgcaattgccgccatatgtgcaaattgtggcattaagggacggagtgctggaattaagtcatttggattagtattttccagccaaatcacacgtgtaacgatttgatcaccacggaccctatttctagaatcataaggaattcccgagtttttaacattgctatccggtacaagcttaatggtattaccagaaggaattgcaaccaccccgtttacatttaagaccccaagaaataggtcataaacttcatctttatttaatggcttattagaaataaccgtgacattaccacgtactctcggatctacagcgaagttctttcctgtaatgtctgcaacttcattaataaaggcagttaagtcagcatcacgtaaattgatcttccatgtttgggcataggcactgctacttactgtcgcaatcaatggggctgctgcaagtaatgcccaaagtggacgttgatgattcaataaagccataactcgcgatatttcctaactcttatggtgacgtgttatcactaaaaattttgttgtatggtcatcacttgatcaccacgttttatttctatttttacttgccctgctcgacgagcctgctcaagtaattgcacatccgtttgcccttgcccaaccgtttgaccattcaaagagacaattcgatcgccaggccttaaacctaacttatttctaagtgcagtcggtgtacgttctgtaacttcatagccttcacctgagttaccacttacccccatatctcggaggtattgctctcggttaccttgcatctgctggatcgcttgtcccaatgcctgttgggccgtattcataggctctgtagattgagatggtgtagcactttgttgtgaagcatccggagtcattggttgatataaaccatttggcaaacctttgaactgaagttcacgggtactgccatttccttgactcaacacaacacgatcccaatacacctctgccaattggtaagaagttgaaccaatggtttcaccaactcgataacgctcagcagtattatcaattttaataacagcagaggaaaaccggtttggatagccgaccattacaccctgcaattctaaattcacgctttcttgagccgcattggcagaaggttcgttaaaaagtgaaaaagtactaatatttggtatttgtggttgttgagaaccgagttctacccgatcaaattgcatcagttgaggaggcgcaatcaccaaccaaaaaaatgaagcgagtttccagcataaccataaaattaaaatggcaaggaccactacactcagtcgatctaatttttgccattgcaattgctgtaatttatcaatccatactttcattagttaccaccttgtaataatggttggcgagaactaatgacaaaagtatccaaaccagctttaccgtcatatgatggaacattgagtaataaacgctgtgtgagctgaacatccagcatcatattggcatctagtaaaagattggccattttttgattacgctgatcacggatgtccacttgtagctgtccgttctggtcagttaattgcccacttaaagaaggcatattcatacgatcttgacgatcaccaatattataaatgagcgctccaccaccccaatgcaattgcccatcaactgccgcaaagccttgctcttttttataattaaattggatatctttaagttgaatactatttacaggccattgccaatttacaatttgcttcagtgtttctggagcaatctggccattcatatcccttacaataactttttttccaaaaccatacgccataatccccgttaattgcgtattaccactatgaatatcaacatctgcagcaaagcgtaataaaagtaagtctagcggtctcgttttccagtggatagtgcctcgtaacgctccacggtgccagtctgcctgcccctgccagatattgccacttacattatggacagtttgattattctttgaaaatttagagataagccaagtcgccggaatctgtaaaataataaaaattaaaaatgcaatgagggcaaaaaaccaccacttccattgcttagactttttcttcattcagccttaccaacatgcaaattatcatccttatatgagagttcctctctagtctgacattatgcatactttttcaacatcgccaattcacttcatataaaaaaaccaagcaatcgggcttggcgtctcgctaaagactataagttgaacgtatgacaaaatcatgaaatttacgattgatcttgctaaatgaaaatttagtctcaacaatgctcttaattaggaattcaagcaccttatcgaatattcatatttaaaattaaattttttaattctttttaaaaataaaaaagccaagcagaatcgcttggctttttaagagacaatacaattagattaagaaatcttcaagttttgcacctttttcaatttcagcaactaaccaacgtggttgtttaccgcgacccgtccaagtctcttcagcattgtttttgttacggtaacgtggttctacagatttacgtgttgttttcttacgtttttgagcgccaaattctagaagttgttcaacactaaaacctacattttcagcaatctcgataatttgattataagcatcttcgattgcttgatcttttttgcttgcaattaaagcttctgcttcttcttgtaagcgttttaactcttcaacagataattcactaatatccggtttcattaataaatactccagtcttactgacaattcaaataatacagacaaaatttaaaaacattaaatcataaccaatagtatttataatctattcaataagcaatagtttgaaagtcaagttcatcagaataacgctataaatttactttttaattacattagtaattataattgtaatatattttcttaatatttatttaagctaaatgtattaaatcatgcccaactgatttttctaattcaataattttactttttacttcacttggtatttcacattttaatcctgtcattttattcacacaaaccataactgcttcacctgtagcaacgatttgctgctgagattcactccataatatataagccatacggaacgcgctcttacgtagctcttctacacgaacccctactttcaatacatctggataaaacacagattttaaatatttgcactgacttgaagcaacaacagtatatatatttggagtcaatatatttacattttccatatataaaatacgtgagctttcaatatatctataatattgcacattattgacatgaccaaaagcatccatatctccccatgctactttctggtcgtatattacagggtagacagacagttctttcatttttacctcagattttaaattttaaaaaattcgcatcattttcaaagattaggtttaactgtttgattaactcatcatcttcttttaaggttgatttaatacgtaaatagctcattaaaatattatcagggtataaacttaataatatttctgcttcagcttgacgacctgttgccatgtaaacatgccattttgcaaatgttaaaactggcaaattcatatattgagattcaaattgattaatcttttcttcaacatcggcatagtcaggaacctgcttaagcaattgttgctgaaaccataagtaaaatacgtccggatcgaattgctctttgagtaaatgcaaggttaatacttcatgctgaatactcatttctggcatacgggccaaaagttttaaccataacaatttactgctataaggtctggtttgaatttctgactctaaatccagatagcgctgttgcagtgcttgtaaatcatctattgaagcttgatcaaactgttgaagaagttgttgtagccataaatcacgatgttcagcgtccaacaaaccatatttcatagaacgcaagtatacccatggttgttgtaaagcaagctggccccaaagcgctgttaaacgttgttgatatgctgtctcaatctcttcaagccatggcgataactgatgctgatataaaaactcaagatgggttaaggcacgttcagcttcgttttgtgccaagaatatttcaatacgctgtaattctgctaactcaaaagccattgggggggattgatccaaggcctctaaagctttttggtaatctccacttaaaactagaaatttggcatcaataatattttttagaaggcctgattgagtaaaaacacgttcgataaatacccgttgatcttcagcagcctctaataaccagacaatacctaattgttcatacggatgaaggtttttaaactgaaaaatattctctctctttctttgttcccgagaagaataacgcttaatccaaagccatatcacctgagcaataaagctcatcacaacaaacgtaaagactaatccccatacatttgtttgcaattgcaattgccgccagtaaatataaacatatcccataccatagccataacttaataaagccaaggctgcgaaaaggactaagctaattaaaaagtaaacccacaggagatgcttcatgtgtcctccttatgagccgattagaccaagtgtcgataatttaggaacaggcactactgataaatgtgccactttagcaatacggtttttgagttgttggctagtcgcatcgggtaattcatttagtttttgcattactgtctgcaactcattttgatattcagccatttttccttggtttaaagcttgctcagcaattaatagccttaattgcacttctttaagcactacacttcggttcattaaattaatagacggcgtttctactttctcaatacggaaccattttttccaccatgacacagcctcggattggtccatctcaaatttaggctgttgtaaggcttgctgaatatttttatcaatattctggagtaaatcatcaatgagttgatgtcgctgattttgagcaagtacaaactgttgaatcgcctgcttatcttgctcaagagcctgatttaagctgtgttgtaatgcaggagcaattccatattgtggtagggtttgctgtagttgggttagatgatctacagcataaataaattgctgttggtcaattgcaaactggattaactctaatttttgtttaattaatacggtcggtgcaattccggtttgaacaacttctgtcgttgctaaaggcgttgttttagaattatgacttggttgattttgaatttgtctttgcaaagcaaccaattgatcattcaaattggcatattgctgttcagattgcagcaagctttgctgaagttcagggacggtacgagaaatttgccacatatcgtagctgagcttagccacccaagcgatgcccagcaaaatgatgatagaaacaagttttctcatacgaatccttataatgcctgaatgtgatgaatcatccccgaaggcgataaattttcaagttgaataatgtgaaaatgagcttgttgctgatcgcgatagtctttaacaagttgaaaaaggcgtggtcctaaaactaaatatacgcaatcaggttgtgccttattttttaaacaaagctctaaccagtatttccagctcgcctcactggtaattaagacgagccatttatctaaattataatttgaattctgtgtcagatgtttgaatgtcgaatatgaagcttgcggacactgccggcgatatagaacaaaatttaaaatctgaattccttgctgttgcaaagtttccatcataaattgacggccgccttcccctctccaaaaagccacactacctgatttttgcatatgatgaagaagaggcaagttaagcattccctcggaagtttcaacctcaggaacatgcgcttcaatcccatagtcgtgaagacgattagccgtcgcctgccccaccgcaatccattgaatatgttttagctcatctatttttaaaccactttgtgttaaatactgcatccccacatcaacagcagtgggactaaccactacaatcgcttgtgcgccagttaactgctgatagagttgagagagtgattctgaaaaaggttgagcaaccagttctaaaagaggtaaagactcgacctgaaaccccttattctgcaaagcatgagttaattcagccgcacgcgagtcaggtcgggtattaataaacaacatagcgttagtagagggcctttaataaatcaccagcgccttgatcaagtaagttccgagcaaggttttcacctaattgctgagcattattcgcttcatctgtaagctcagcccgtaataatgtttgcccatcaacactccctacacggccttcaatatgaatttttccatcttggagtgttgcataacctgcaatcggcacctgacaaccaccttcaagatacgcattgaatgctcgctcagcacgtacacatacatctgtctctgggtgtagaagtggctgaattaaagtcaacacttcttggtcatctgcgcggcattccaaaccaagagcgccctgaccaaccgcaggcaaacttacacttggctcgatacagtggcgaatgcgttctgccaatcctaaacgttttaaaccagcactcgccaagataatagcatcatattgaccatcgtctagcttcgctaagcgggtaccgacattaccacgtaaatcaataatttgtagatctggacgttgttttaaaatttgtgatttacgacgtaaacttgaggtgccaacttttgctccttgcggcaaatcagcaaatttttcaaattgattcgaaacaaaagcatctaacggatcttcacgttcgcaaattacggccaaagttaaaccttctggtaatgccattggaacatctttcattgaatgtacagcaaggtccgcacgaccatctaaaagtgctgcttccaattctttaacgaacaaccctttgccaccaatttttgctaaaggtgtatctaaaattttatcgccctgcgtgacaaacttaaccaactccaccgttaaatctgggtgaagctcctgtaaacgggcacgaatatgttctgcctgccaaagagcaagtgggctttgtcgtgtagcaattttcaaggttttcataaattcaagcatgggctggtcaaacaatacaccctaaacttaacttgatcccttaaaattgcaagtaaaatctcacaagcaaaaataagatgaatacaggttaaagttggtgtatccgttctctaagggtagataaatgacggcggcttacggaaagtctttcatctaagccacgtaagcgaacctgatattggcccgaacttactagctccaaaccatctaaataagcaatcgagaccaatgcattacggtgaatacggatgaactgatctgcgaactcagtttcaagttctttaagtgtttcgtcaatcaatacgctgccatttttatgacgtaccgtgacatatttctgatctgctaaaaagtaatagatattttcaacaggaattagctcaaccccacgataggttttagcagcaatttgatgacgttgtgtttttaaatcctgtaaaagctcaggtttaggcaaagcgctgagctgcgcttgcgttagctgggttaattgcttaaatgtctgctccagctcttgaggatcaatgggcttaagaagataagcttgtgcttgtgacttaaatgcctccaatgcatgctgatcataagctgtgcaaaacactatggcaggtcgaggattaagttggcttaattgctccgcacagacgagaccattcatacccggcatctggatatcaagtaaaatcacatctgggtgatgaagccgtgcctgttccaaggcatcttggccatgatgagctgttgcgacaacctcatgtcccatctttgaaactaaacgtgacaatcgttccactgcaagtggttcgtcatcacaaattagcaccttcattcatcctccttgtcaccgttaacttggtccatttttttatggttaactctgactgacttattattttgattggtattgatagctcataatagtggtatataaagcctcacccttatatacctggaatctcactgaattcccataatacgcttttaagcgctgtttaacattttcaagagcgattccatgccctttccgtgaatttattgtatcgtgtgtataagggttggtaatgactatactgacctgattttgcaatatttcaaccaataccccaatggttgctttacccatcattggctctaccccatgaaaaatactattctctaataaaggttgtaatgtcaataaaggaatagtgacctgttttaattgcaaaggttcaatttccactttccattcgacttttaaacgctcgcccaaacgtatttgctcaatcattaaatattgcttactaagctcaatttcttcatgcaagctcactaattttaattcttgaaaactcgcccgaaacagtcgtgacaggctaattaacatactttctgctttatctggatctatcgttattaaactcaccacattatttagactattaaataaaaaatgaggatgaatgcgagcctgcattgcctgaatacgggcatttaattctgcatattgttggtgtaaccattgttctcgaacatataaataacgcagacaaaaggcccctaataatattccataacttaaatataaagggacattggtaaaataaatgctccagtcctgcgctataacagatgtttttttcaaaactccaaactgaaaaaaattgcttattatggtggttaccacaactatcgcttgcagcataacaaagccaattaccaaagcatatttttgctgtagctgactaaaaaaatcctgaaaatgttcaaccaaggcaaaaaaagacaaaatcacccagttaataaaaacgatatattgtaaaagacgtgagccgtttaatgcatgccaagactgcgcttcagccaaagctaaaaccagagctaaaacattacttgcgataattaattctaataaatgttgccaacgatcaattttcgtaaaaaaataggaggaattttgatttcgatatgctgtagaaaacaactttgtttgttgagcttcggcaagtgatatactcttttttattttactgagccaccatgaccacatcttcaaatccccctaattcagcagccccaaaccaaacctcaggtatgtggggtggtcgtttttctgaagcgacggatgcttttgtagccgaatttaccgcctctgttcaatttgaccagcgtttttataagcaagacatcgctggttctattgcgcatgctaccatgcttgcgaaagttggcgtactgacagaagcagaacgagacgacattattgaaggtttaagcaccattcgtgcagaaattgaagctggaacttttgaatggcgtatcgatcttgaagatgttcacatgaacattgaatcacgtttgactcaacgtatcggtattacaggtaaaaaacttcacactggccgtagccgtaacgaccaagttgcaactgatatccgtctttatctccgcgacgaaattgacgacattttaggcttattagagcgtttacaaaaaggtttgttgggcttggctgccaaaaatgtaaatactattatgcctggctttacacacttacaaacagctcaaccggtaactttcggccatcacttgttggcatggtttgaaatgttagttcgtgatactgaacgtcttcaagactgccgtaagcgtgttaaccgtatgccacttggttctgcggctctcgctggtacaacttacccgattgaccgtgcttatacagcagagttactaggctttgaagctgtatctgagaactctcttgatgctgtatctgaccgtgattttgctatcgaatttaatgcagcagcatctttaatcatgatgcatttatcgcgtatgtctgaagaacttattctttggacttctgcacagtttaaattcgtaaatattcctgatcgcttctgtactggttcttcaatcatgccgcagaagaaaaaccctgatgttccagaactcatccgtggtaaatctggccgcgtatttggtgacttaattagcttacttacgcttatgaaaggtcaaccactggcttacaacaaagacaaccaagaagataaagaacctttatttgatgccattgataccgtccgtggttcactcatggcgtttgctgacatgatccctgcattggttccaaatgttgaaatcatgcgtgaagctgctcttcgcggattctctacagcaactgatcttgctgactacttagtgaaaaaaggcgttgcgttccgtgatgcgcatgaaattgtaggtaaagctgttgcattaggtgttgctgaagaaaaagatttatctgagttaacacttgagcaattacaacaattctctgacctaattacagcagatgtatttgataaagctttgacactagaagcttcggtaaatgcacgtgatcatattggcggaacttcaccaaaacaggttgaagctgcgattgcacgtgcccataaacgtctagaacagttatacgcttaaggatacaaaatgagtcgacaagtattttgccgtaaataccaaaaggaaatggaaggattggactttgctccgtttcctggtgccaaaggccaagaattttttgaaaatgtttctaagcaagcatggcaagaatggttacagcaccaaactacgctaattaatgaaaaacgtttaaacgtgtttgaaccagaagcgaaaaaattccttgaagagcaacgtgagaagttcttcaataatgatgagagcgttgaaaaagcggaaggctggaaaccagaataacaggttattccaagcccatcattttaaaaaaggcaggtttatatacatagacctgcctttttttacgtgaaacttacacaaacatataaagccttacatagagcgcacaggactctacatgacatgaaatggctgaaactttaatatcaattcatagcaagtaagacacgatccctgtcgtgttttttcttaatgcacttgattttctgtcctgaacttccccccaaagttcgggacatttttttatctattattttaaaaaataaaaaagccttgtctgaaacaaggcctttaaatatttcagctcacatattacttttcgtgtacttttgcttcaatttcttcaattttggtatggcgtgcatcaaagccttttgccatgtaaatgacttgttcagcaatattacgagcgtggtcaccaatacgctctaaagaacgtaaaacccacatgacattaatcacacgagcaatatgacgcgggtcttcaatcatataagtcattaaagtacgcgttgccgactgatattcacggtcgatgtcagcatcggctaaaagtacacgtaatgcttgatctgcatctaaacgtgcaaaagcatcaagtgcgtcatgaatcatgacccgtacttggttaccaatatgacgtgtttccatgtagccacgaggagaaccgccctcttcacatagattttgcgcaatacgggcaatttttgcagcttcatccccaatacgctctaggtcagtattggctttactcatggcaattaccatacgcaagtcaattgctgccggatgacgacgtgccaaaatcagcgtcagcccttcatcaatatcacgttcgtattgattgactgcattatctttaaattggacatcaattgctaagttcgcatctgtatcaagcaaagaatgaattgcattggcaacctgttgttcgaccaagccacccatggtcataaactttgtgttcacatcttgcaaatcttcattaaattgagaagaaatatgatggcttaacaccggattactcggactcaagggaagcctccaacatgatggcgcagggataaaatgattgagcattaaaacacatcaatcattaaatttttatgacaaaattaaatttcagataaaagcattttttattactgatacgttaaccagctgtttaattcaactagatctttttcccctagctgacctacagccgcttttaaacgtaatacatttaataaatagtcatactgagcattaagataatcctgttttgctgaaaaagcattacgctgcgccaataaaacatcgaccatactttttaagccttcgttataacttgcttttgaagcttgagaaacaagtgctgaagagtccattgctgcctttcttgcttcaagttttgctcggtcagtatctacctgcataaaagcacttttcacatcgacattggcacggcgaatggccgcatcaagttgggcttgcgctttatttaactccacactggcttttttaatagaagttcgagtccggcctccattaaataagttccagttcatctctaccccgacctgatcaaacttcccatcagtcgaaatcagcgtttcgggcgtttgtttagtataaccataactcgccactgcatctatctgtggataaagtgcagctttttccacacgacgttgatcttcagcatatcgcttttgtaaacgtgcttgctgaatctttaaattttgttgttgggctaatcctaaccactcatcgagctgtgccggataaggtttttgaaagataaaatcacttctcaatacagcaagcttatcttgatacggaccaatatattcagatagttgctcttgagccaatagaagctgcacattggtagcaatacggttggctcgggcattttgatattgggcatttgcttcactcacatcactacgtgctaccaacccttctttaagcttggcgctcatcatattgagctgttcaagcaaggctttttcttcttgtaaatatgcagcggtaagtgcctgctgacgcaatacattaaaataggcttcagctacatttaaaacatgatcttgtttttgcagtcttaaagtaatttcactaagggcaaccgaagttttaacctgtttataaccttcccatgcatccatacgaaaaagaggctgacgggcagataaagtagcctgtttggtagtcgatgtattacttaccaaagcatcggaaagtccttcctgatcaacaccaggaaaatttgaacgctttaccgtttgtcgattacgggtaatatttccagataatgtaactgttggtagtaacgcgcctgttgctaagcctaaattaagctgatctgcttcaaactgttgttgattcgcttgccacgtcggatcatttagttttgcgcgctcataagtttcaactaaatctagagcaaaactcgacgatgtaaaactccataaacccgcaacaagcattaattttattttcattgtttaaatcaacgataaaacttggctttaagactaagaaaaatttaatttaaactcaagccagtaaaagttttcattttttatgtattttcaggctttgataacatcaaaatacaaatgaaaatcaaaaacatgcctgcccacccaatccatgagacactttcgccaaccaaaacaatggcaaaaatcgctgcaacaagaggttcaaataaagttaaagtggtggcttgactggcatttacagtttttaacccgaaaccaaaaagcaaataacccaaaaacataggaatcagcatcatatagccagcaacaagtaaatttgttgaactttgcagtagcccaccacctgtaattaataaagttggaagcaagatgactgccccacctcccataatcatgcccattgcagctttagctgcaatacctcggtctattaatctttttgcagcccatgaataaagtgaataggttgcacccgctaccagcccaagaaaaataccaaaaattttattccattcatttgtactctcttgtgctgcgtggctttcgcccatagataacaaacttacccctacaacacccaacacaaaacttaggaaccatgttttagataaaactttacggtcaaagaatcgctctaaaactgctgcaatgagtggagccgaaccaattgaaaccaccgtaccaatcgtaattccggcataatgcatggaagaataaaaagctagggggtatatcccaactgccacaacacctaaaagaataatagaaatatttcgcccaataaattgtcggtgttcccggatggcccgagatgcaatcaatgcctgtaaaagcccacctccccccatagcaaccgcgccaattgcaagtggaccaagtgttggggcaaatgctgcggctgtccccgtggttccccataagaaagaggctactaaaattgcaatagtgccaccataactactatttttaataaggctaatcatgttggcattctcgatctaaaacatcttctgccatttgtctcgctaattgaagttgacggctactaccctctaaaccagctcttgccatcgacccttctaataaaaaagaaagttgtgaggcgatatagctaacacgctgtgaatcttttaataagcgatttaaatgctcggcaacaatcgcctcaacttgttctttatgctgtcttacagcatttcgccctgaactatttgctgggaactctgcggcagcatttaatagcccacatcctctaaaacccttttcataagcaaactcggcatgatcttgataggcatcaaatacggccaaaatagcttctttcgctgtttttgttttttctaaacgcttttgataaaggtctaaccactcttgatgtcgtgcagcaatataggcatcaacaagttcaccttttgaagaaaaattattgtaaagcgacattttagctacatctgctttagccgtaaccgtattaattcctgttgcagtaatgccatcgttataaaacagtgttgccgctgcatcgagaattttctgtcttgctgttctatcattcatagcttttacttaagtagaccgacctacctaataataaagatttctaacagtgatgcaatctttttaagcgttataatttgagcaatatcaatttcgataaaaatataaagatgaaaaaaattctaatgatgagtatgtgcggcgcactacttttaactggctgtaataaaacatcacagcaagatcaaactgtatctaaagagcaaaaatcaactgcgcaaaaggccaccgaacagcgagacagtagctgcttacaaattatggtagccatgcacacgattaatcagaacagtaaaatagaagacttaaatcaaattaatgaaaagcttaaaacctgtgttccttcgttaaaaaatgaggaacagcttaagctaattgatgcatcaacaaccatgtatcaacgttttattaaacaagactacactgaaaaaacagggagagcttttgaagcatttggctatgctgttttagaacagaaacaagaccttaaaaaggtgattcaaagtcagaaaaagctcttcgcccaactgagcccgcgtgatcaatatttacttcaacatgaaggccaagcctatattgagctgctctatcaaggtgaaggtatgtttacttatcgtcgccagccaaactacttagttgatgttttttctaaggctttacccgctgaccagaaagaatttttatctcgtatggcaaaagacaatcaagacattttctataacgatggtgctttggctgtttcatggaaagagcttactgaacgtgctttattttgggaaaagtttattcaaaaatatccaaagagttattttattaatgatgccaaattactctttaatgaatatcgatacttcattttctttggtctagataacacacctgtgtcgaatgaatatgccccgaacacatggtttgaccctgatgcacttcagcaaatccgctttttatcaactcagagccaatccagcttagcaaaacctgcccaacaatttctgaagtttattgccacccctgtcgatgagcgcaataagcaatttaaaatagatttaactgatgaaaatgggcaaaagaaatctacctatcagattgtgcatgaacaacttgagcagctattaaaatttgattcgccatggaacacagaagtctatcgtgactgccatatagatgcggtttgtatagatacaaattgacaatgccagccaacctaaaacatgttagtctttaaatcgcttgacggagcgcgagtaatagctcgctgagattgtgtaaatttcgtgttatcgcaacaccagtttgatcacaagtaccgttgaacctgatcaggttaagacctgcgtaggaatcaagccatctgaaaacctaagccctcaatttatctagttcaagataaatccgccatcgtttttggtcgtgcttgattcgttgatgttattcataaggatcatgtgatgaaccaattaacgaatctctcttctgctgaaatttcagcacaacatgaacaagatgcaaaagacttaacccgcatcttacccgcttctaaaaaagtttatattgaaggctctcgccctgatattcaggttccaatgcgagaaatttctttaaccgataccccaactggccttggtggtgagcacaacccacctattatggtatatgacacttcaggtgtttatactgacccgaatgttcaaattgatttaaacaaaggtttaccttcagttcgtcaaaaatggattgaagagcgtaacgatactgacgttctttctggcctaacttcaaagtttggacaggagcgtttaaaagatattcgtactgctgatattcgctttgcacatattcaaaacccacgccgcgctaaagcaggcaaaaatgtcactcaaatgcactatgccaagcaaggtattatcacgcctgaaatggaatatattgcaattcgtgaaaatcagcgtcaacgcgaagctgtagatatgcgccagcacccaggtcaaaactttggtgcgaaaaacttaaaagaaattacacctgagtttgttcgccaagaagttgccgaaggccgcgctattattcctgccaacattaaccacccagaacttgaaccaatgattattggccgtaatttcttggttaagattaatgccaatattggtaactcggcgcttggttcttcaattgatgaagaagttgcgaaaatgacatgggcaacccgttggggcgctgacaccattatggacttgtctacaggtaagaacattcatgaaacacgtgaatggattattcgtaactcaccagttccaatcggtaccgtaccaatttatcaagcacttgaaaaagttgatggtgttgccgagaacctgacttgggaaatctttaaagacacgcttattgaacaagctgaacaaggtgttgactacttcaccattcacgcaggtgttctacttcgttatgtgccacttacagcaaaccgtttaacaggtattgtgtctcgtggtggttcaatcatggcgcagtggtgtctcgctcatcatgaagagaacttcttatacacacacttcgatgaaatctgtgaaatcatgaaagcctatgatgtgtcatttagcttaggcgatggcttacgtccgggttgtattcaagatgcaaatgacgaagcgcagttcagcgaacttaaaacactgggtgagctgactcaccgtgcatgggaacatgatgttcaggtcatgattgaaggtccgggtcatgtaccaatgcacatgattaaagagaacatggacttacagttagaagtgtgtaaagaagctccattctatacgcttggacctttaaccacagatatcgctccgggttatgaccacattacttctgctattggtgcagccatgattggctggtatggcacagcaatgctttgctatgtgacacctaaagaacatttaggtttaccaaacaagaaagatgtgaaagacggaattattacctacaagattgcagcacacgcagccgatcttgccaaaggtcatccgggtgcacaggttcgtgataatgccttgtctaaagcacgtttcgaattccgttgggacgaccagttcaacctaagtctagacccagatacagcacgcagcatgcatgacgagactttaccaaaagaagcgcataaatctgctcacttttgctcaatgtgtggtccaaaattctgttcgatgaaaatcacccagaatgtacgtgactatgccaacaatctcaccaatagcgattcagaggttgaagaaggcctcaaagcaatgaaagaggtttatcaagagcaaggacaaaaactgtatcataaagtgtaaatattcaaaaaaaacacttgcctagccatgattctcggttaggatgaaataaatagatttcgtcctgatcgaatcatgagtattgtcgagcgtccaagttatacatctaaagatgtcgaagtaacatcacgtgaacctctgttcagtggttttattcaagttgaaaaagtcagccttcgacatcgtctatttaatcaatctgaatatactcctgtattgcagcgcgaacttgtgcatcggcctgaagcggctggcgttctactctacaatgatcaaaaacaacagtttgccctgattgaacagtttcgtgttggtgctttagatgactcccattcgccatggcaactcgaaattatcgcaggtgtattagatggcaatgaatcaccagaaagttgcattcgacgcgagagccttgaagaatcaggttgcgaagttcaggatttagagcatctatttagtttttacccatcagctggcgcctgttcagagttatttcatctgtatgttgccgaaaccaatttacctgctgtaggtggtgtttttggggtagataatgagggtgaaaatattcagctgcatttgtttagttatagtgaaattcaaacactactcgacagcggacgtttaagaaatgcccctgttattatggcattacaatggctggctcaacacagcaaaacgataataaatccgaagaggtaggacggtgacttttcaagtctcaacactttcacaaaaaaatcatgtcatcatacaaattaccgatacacatttattggagtatccacagctagaatttgtggggatgaatcctgaagaaagtttccacgccattattcaacagatactaaaacaacatcccgaagctgatgcgattattcataccggtgacctcgcacaagccccaacacctattacctacaaacgttatatcaattttatgcaaaccttgggtctgccttttttccagaccctcggtaatcatgacaatgtcgaccactttcctctacataacgaaaaccatcaacaacctgtagttgtcggtttaggaaactggcgtgtgattatgctaaatagcgcggtaaagggaaaagtagatggtcatctgtcttcggaacaattagaaaatttagcgaatttacttgaacaatttgcagatcatcctgttttgctggcttgtcatcaccatccatttgccatgaaatcaaaatggattgaccaccataagcttcaaaactcaaatgcacttttagataccttaagtccatttcaaaatgtgaaggccctagtctgcgggcatgttcatcaagattcccttaatatctggcaaggtatcgagtttttttctacaccttccacaagtgtacaatttaagccgtttagtaatgattttgcactcgaccaaaatgcgccgggttatcgttacattcgtctgaataacgatggtagttttgaaacaaaagtgtttcgccttgaaaatttcaaaacccgtataaatactgatatttcaggttattagccctaaagtttatataacccaaaagaattatgactagggtaaacacgttttgaaaatatttacgggacagaatgactatcatcttgcaggaaaaatctatatgatgacgacccgatggaaaaatccatcgatggttttctataaaaacacttgcatatcaccatattttttgcgtatagataatacgtgtatgatgaggaatgccctattatggcgaatgacaaccacaaccaagttttggatgaacatacagaagttgtagtagaaggtgataaagcttctgcaaaacgtgcacgtaaagtgaaacctaaaacttctgacgtaggctcaactgcaagtttatttggtattgcaccttatcaacctaagaaaaatgaagagtacatgtctgaaggacagctcgagcatttccgacaaattctgcaagcatggaaagctgaattaatgtctgaagttgatcgtactttaaatacgatgcaagatgaatcaactgcattgccagacgtaaatgaccgtgctacccaagaagaagaatttgcaattgaattacgtacacgtgaccgtgaacgtaaattaattcgtaaaatcgaacaatctcttgaagcgattaaaaacgaagactacggtttctgtgaaacttgtggtatcgaaatcggcttacgtcgtttagaagcacgtccaactgcaacgttatgtattgactgcaaaactttggcagaaattaaagagaagcaaaataacggttaattgtgacggttaagaattctccagccgagcttagttcggctcttgcgaatcagcgaaacgatgttccactgattcgctactcaggccggtttgcgccctcgccaaccggccctttacatttcggatcactcattactgctgttgccagttactgtgatgccagagcccatcaaggtcgatggttagttcgtgttgaagacaccgatattccccgcatctaccccggtagtgaagaccatatactcgcatcacttgaagcttttcagttcgatccggatgccgagatcatttttcaaaaagaccgcctagatatttacgaaagtgtattagaccaacttaaaaaagagggtctggtttacgcctgtcaatgtacccgtaaaatgctcggttcaaacgctatctatgcaggcacatgtcgagatttgcatctcgacttccaacatcaagccattcgggtaaaagttcaagatcagccaatctgtttcgatgaccgcctacaagggcttcattgttctaatctagagcatgaccttggtgattttgtccttaaacgccgtgatggaattattaactaccagcttgctgtcgtcgtagatgattacctacaaggcattactcatgttgtgcgaggtgcagacctgttagataacactgagcgtcaaatctggcttggtcagctcctcggctaccctaagctgagttacatgcatcttccgctcgccatgaacgaccaagggcaaaaactttcaaagcaaaaccttgcccatgcacttgatttaactaaagctcctgagttactacaacaagccatacaagccttaggtcaaccacaggttgatttagatcgccccgaagtgatgctcaagcaagcggtagcccagtggaatgtagatttgattcctcatggacaacaactttgcggaacatatctataaataataaaaagcccgatttgatatcgggctttttataacgcttcatggtttagaagtttgattcttccctctcagggttcacttcttgagttgaagcatcaatctttaagatcaagctaatcatagctgcacacatcattaaagacgtaccaccataactaataaatggcagagttaaacctttggttggcattaagcccatgttcatacccgcatttaccaaaatctggagtaagaaaataatactaataccgtaagccaaatagcctgcgcgaagataatgatgtttcaaggcacggtggccgattttgatacaacatgccagcatcaagaaagataagccaatgacaatcgaaataccaaagaaaccaaattcttcacctaacacagccaacataaagtcagtatgcgcttctggtaaataggaaagcttttgaacactatgccccaagcctgtaccaaaccactcaccacgaccaaaagccattaacgcatttgataactgataacccacacctaatgggtctgcccaagggtcagtaaacgaaatcaaacgttggaaacggtaaggttcaaataaaatcaaaaacacaatacccgtgacaattgcaccaagcatgattaagaattgtgttggaggcgcacccgctagaaagaacacaccgaccatcatcatgacaataaccaccgtcgcacccaagtcaggctcggcaataattaaacctaccgtaattgccataacgccacttaaacgaagtaagcctttccagtgggtacggacttctttggcacggcgtactacgtaatctgcggtaaagatggccatcataaccttggcaacctctgttggctgcaaggtaaaaccaccaattttaatccaacgtgtggaaccgttaacttccgaacctacagccaaagccgcaagtaacaaaaccatagttaataaccacagtggaaaggtatttttaaaccatgtattgagtgatattcgataggttaaataagccaccacgccagcagcaacgattgagatcccatgacgaatcacatagtgaaatgggttttcatgcatatattcagcataaggcatggaagcagatgcgaccatcactgaaccgatacataacaatgcaaccacacagaaaatcaagacattacgtggcgtcacttccgctggccatttcggcaatatccgttcataccaatgattgattttctggattgtggtctgagctaagcctgccatactacattcctaatcatattttctttaaaccaacgaattgacgcaggcaacaaactgctgaccacggtcattataacttttaaacatatcaaaacttgcacatgctggtgatagcaataccacatcttcagcttgtgtttcacgttgacacagctcgacagcttctttaagcgttgctgcatgtaaaattttagttgcgccttgaatggcttgctcgatgaccggcgcatcttcaccaatcaataccacaactttggcatatttttcgatagaagaacgtaaaggagaaaaatcttgccctttgccctgtccacctaaaataagtgcaaccttaccttttttcacttcaatggcagcacctaagccatcaattgctgcaagtgtagcaccaacattggtacctttagagtcattataataacggacatcacgcacagttttaacgtactcacagcgatgctctaatcctttaaatcgttttaaagtttcaagcattgactccataggtaaaccaattgcctcccccaatgctaaacacgctaaagcattggctacgttgtgcataccttgaatatataaatccgagcttttaattaaccgctgtaaaccacgagcaagccaaagcgtaccgtcggcatctcttaaaacgccatattgatttaaatctggtgcgtttaaaccaaagctttgcattggtgtcgtatctggaacaagtgggcggcttaaagcatcgtctcggttaaatacaacttttttagcgccttggaaaatacgatgttttgcttggtgataccccagcatatttccatgacggtctaaatggtcttcactcatattgagaaccactgctacctcagcgtttaagtgagaggtggtttctaactgaaagcttgataactcaaggactagtagctctggttgatctttaagtaaatctaacgctggtcgaccaagattgccgcctactgcaactttcttacctgcatccttagccattaagccaattaaagtcgttacagtactttttgcattggaacctgtaatcgccacaatcggcacatcagtggcacgacgcaataattggatatcacccaccacagaaatacctttagcaatagctgcctgaatttccggtaattgtggtgcaaggcctgggcttaaaataatctcttctgcttgtaataataattcttgatcaagctgaccaaaactggttttaacgccagccggaatctgatcgtgtccgggaggtgtggggcgggagtccgttacagcaacttggtagccttgttcatgcaggaaatttacagcagaaacacctgatattcccaagcctgctacaacttttaatccaccacgttgtattaacatttttgccccacaatttatcaatcgacagaatggcaaaaatgttagcactttgctgttttgaatgctttttcagattgaactttattcatctttttttgtgtcagtgcgtaaaaaagccatcaatatgatggctttttatacgaaacaggaatggctgaatttattgccatttaactggtttaatttcttgaattgtattagttggtttatcttcacttgagcagccacagccacctgcacaaccaaaagtcatttttggttttagccattttgctaaagttgcccaaccctgcttttcacaaaaaacggatagtgctgaaaaggccgagtttgctgtttttggaaatactttcttaaaaacaacaatagcactccaaatcactaaaaccgcaataatcagatattgaagcatatacaacctcctttactgctttaaccccaatagtgggaagcaatttgataggtaacaaacgatgcaaaataagctaaaccaaacagatatgcagtcatagctgcaacatgtttccatgaacctgtttcacgacgtactgttgccaatgttgccaaacaatgcggcgcataaatgaaccacactaaaagcgataaacctgttgccaacgaccaccctgtaccatctgcactaattaaatgagacaaaccttgtgctactgcatcttcatcagttgccgacaaggcatatacggtacctaatgcagcgaccacaacttcacgagctgccatagccgggattaaggcaatacagatttgccagttaaaaccaactggagcgaataaaggctggataaggtgtccaagcatacctgcgaagctgtaatctatagcaggcaatgttgccccttctggtggctgtgggaaagtacacaagaaccagagcaaaatagaaagcgcaaaaataatgccgccgacacgcttcaagaagatcttcgcacgatctaacaaaccgattcccacactttttaaatcagggaaacgataactcggcagctctagcagtaaagcgtgttgagacttatctttttggaaaaatttcattaagaatgaaacacacagtgcactcacaatcccagccatatacagaccgaaaagcaccagtccttgtaggttaaaaataccccagaccattttctctggaataaatgcagcaatcagcaaggcatatacgggtaaacgtgccgaacaagtcattagtggcgcaaccataatcgttgtaaaacggtcacgagggtcactaatactacgcgttgccataattcccggtactgcacaagcaaagcttgaaagtaacggaatgaaagcacgtccacttaaaccagcttgaaacattaatttatcaagtaaaaatgctgcacgcggtaaatagcccgattcttctagtactaaaatgaagaagaacaaaattagaatttgtggcaagaaaacaactacgccacctgcacccgcgataattccgtcaaccaccagactatgcagtagtggctgtgtaatcacagaacctactacttcacccagccagccgaagaagccttcaataccatccataaaaggtgctgcccatgcaaaaactgcttggaacacaataaacatcatgatggcaagactaagtaggcctaagactggatgtaagaaaattcgatcgagaaaatcagtacgcttgtcttcctgatcaacataatgaacaacatctttaaaaatcatatcgattttttgatgatgagtccctgttaaaccactcagttcagtttgtggcacactgtatttttcttgatcaagggcatgtaataaattttcaatacccgcattacggacagctactgtttcaacgactggtacacccaaacgttgagataacttttgagtattaatctggatgccacgacgacgcgcttcatccatcatattcagtactagtaaaatcggacgacctaactcgatcatttcgagtacaaggcctaaatgcaattttaagttggtcgcatcaaccacacataaaaaagcgtcttgttgcccctcttccgctatttttcctaaacagacatcacgggtaattgcttcatccggactggtcgcattaagactgtatgtacccggcaaatcgagcactcgaaccgaacggcctgaaggtaactgaaaatgaccaactttacgctcgaccgttacaccagcatagttggcgactttttgtcgagttccagttaaatggttaaaaagagaggttttaccacagttagggtttcccacaagggcaatacgtaacgcatcactcatgcgggtactccttcttctacttgaatttcgattttttccgcttctgctttacgtaaagcgaaacgagtaaagccaatttggattaagatcggatcaccaccaaaaacacccttggtaatcacttccactcgcgtgcctggtacaaaacccagactttccaaacgaattgcgaccaaatcttgctgctcggactctacttctatccgattcactttggtgatggtcgccgcttgcttcactttcaacgctgataaacgcaccgcatccgatcctaaaccttttttactagtatacatataaatgagaataattaccaaataaggttagatttcaattcttatggagtttaatcgacaaaccttaaagtttcttttacagtacagtggtttagaggaagttgtttatgataaataaaaaaccgcgtattccgagccctgttcaaattcctgaacatttaagctttttacaaggttttcgcgactatctggttgcacaaacagtcagtccgcatacgcgcaatgcctatttatccgacctgatccaatgtagtgaacttcataaaaaaaatagattgccagattggacgagcgatgacatttctgacgtcctcattgaacttaccaaagtagggaaaagcccacgctcaattgcccgttgcttatctgctctacgtcagttttataaatttctacgtgaacagaaattacgaagtgataatcctgtagctactcaccattcaccaaaaattggccgagctttacctaaagacttgtgtgaagaagatgtagaagcgctcattcaggcgccagacattacaacggcgttgggcttacgtgaccgagcaatgtttgaagtcctttacgcttgtggtttacgtgtctctgaattactgaatttacgcctcgaacttattaatttaaaacaaggttacctgcgtattacgggtaaaggtaacaaagaacgtttagtgcctttaggccaatatgcctgcgattgggtggaacgctatttaaacgaggcacgtccacaattttataaaagttcaactgactatttatttttaacccagcacggtggaattatgagccgtcagaacttttggtatgccattaagcgttatgcgctacaggccaatattcaagctgaactttcacctcacaccttacgtcatgcttttgccacgcatctacttaatcatggggcggacttacgcgtagtacaaatgttactgggtcatagtgatttatcaaccacgcaaatctatacgcatgtagcacaagtcagaatgcaacaattgcatgaaaaacatcaccctaggggttaaaattttttaaacgaatatttcgaaatacctcaaacaatcgcttgatttcgttcacaaaggttaagaaagttttaacaatacactctagattttttgttatgcttagcagcttctgactataaatactgatgaaataagggttatctatgtcctttacccgatctcaaatttttcttgcctgtgctttggcttctagcctgttgttcagtgcttgttctaaagaaaacaaaccacaaaaagaagatgcgctcacagcgaccgcacctgctacaggggaagcttcaaccattattgaacgcaatgctaaacagcgtttaattgaaactttgcaaaaacaatttaagaatgcaaacatcaacgtcaaaattttagatattaagcctaccgaagtgcctaatttatattgggttaaccttgaaggaatgacgtcggtttatacaacaagtgatggtaaatacctgattcaaggtgatgtcatccgtttaggtgataaagaacttcataatatcggcgatagccttcaagcctcagaaaacaaaaagcatcttgctgctttaaaaaatgaagacttaattgtttatccagctaaaggcggtaaagctaaacatgtgatttatgtgtttaccgatgcaagctgtccttactgccataaattacatgagcatttagctgagattaatgagaaaggcattgaggttcgttacattgcatggccacgcggcgaacagtttatgccaactatggaagcggtttggtgtagtgcagaccgtaaagctgcatttgaccaagctgtacagggcattagtattccacctgctcaatgtaaaaaccctgttcgcgaacaataccaacttggtctaaacatgggcgtaaatggtacaccagctatttataatgttgatggtgagtacttgggtggctacttaacaccggatgaattgattaaacgattggataaataaccctctccaagttgatgaacaattcctcatctatcttacaaataaagcgctgatattattgcagcgctttgttttttcaataaatacttcttttcataccagtgtttaaagagtgatctactcttcttttccaaacattgcactctaaatcactgaacaggcgctaaaagcgctagagtctggcgttttttttagctatgatctagcttcaattaaatgattcaatgatgatatggagtgtgacgtgaaaccagttcgcctggcaatactcggtctaggtaccgtaggtggaggagcccttaaactactacaagaaaatgccgctgaaattaaacgtcgcaccggtcgagaaattcaaattacccacgttggaacacgtcgtcctcgtccagatctcgaattggaagggattaaacaaagcgctgacttacttgatatcgttcgtcaacccgatgtggatgtggttgtagaagttatgggtggtattcatcctgcttacgaaatcattatggaagcgatcaaacacggcaaacaagtcgtgactgcaaacaaagcattactcgctgaacatggtaatgaactatttaaagcagcagaagataatgctgtacaaattgcttatgaagcagctgttgctggtggcatcccaattattaaagtaatccgtgaaggccttgcggcaaaccatatcgaatggcttgcaggcattattaatggcacaggtaactttattttgactgaaatgcgtgaaaaaggccgcgcatttgatgatgtattaaaagaagctcaagaactcggttatgcagaagcggacccaacttttgacgttgaaggtattgacgctgcacacaagcttacaattttagcgtcttgtgcgtttggtattcctttgcaattcgataaagtctataccgaaggtatcagcaaaattactgcacaagatgtgaagtatgctgaggagcttggtttccgtattaaacatctaggcattgcccgccgtgctgaaaagggtattgaactacgtgttcacccaacacttattccagatgagcagcttattgcgaacgtaaacggcgttaaaaatgctgttttagttcaagccaacgcagtaggtccaacgctttattacggtgctggtgctggtgcaggcccaacagcttctgcggttgttgccgatgtaattgatatcgttcgtgatatttcttatacagaagatggcgcaggcacaattcctcaactggcttttgaagcattaacaaatatgccaattttaagccgtgaagaaatgaccacaggttattacatccgcttaaatgctgaagatcagactggtgtacttgcagatgtgacgaccatcttaagccgtgccggaatcagtattgatgccatcatgcaacaatctcgcttaaaagacctcattccaattgtgattttgaccgatccaatcgttgaatccaaaatggatgacgctcttgcgcaaattcaagcattacctgcaattcgtggcgaaatcgtaagaattcgtttagaatcgctcgatagttaatcaggttgagggaaagattccctctcccgcttcacctcataattggaacaccatcatgtctaatgccaatcgttatactggtcttgtagatcgttatcgtgaccgtttgccagtttcggcaactactcgtgctatctctttgggtgaaggcaacacccctctcattaaacttgagaatattccacgtattattggcaaagacgttgaaatttatgtgaaatacgagggcttaaacccgactggttcatttaaagaccgtggtatgaccatggctgtaaccaaagcagttgaagaaggctctaaagcaattatctgtgcatctacaggtaacacttctgctgctgctgctgcctatgctgcacgcgcaggtatcaaagcgtttgttttgattccggaaggcaaaattgcgatgggtaaaatggcgcaagccatgatgtatggtgcgatcactatgcaaattcgtggtaacttcgatgatggtatgcgtcttgtaaaagaagtggctgatcaagcacctgtaacgattgtaaactcaatcaacccttaccgtttgcaaggtcaaaaaactattgcttatgaaatcgttgaagctttaggccgtgcacctgattaccactgcttaccagttggtaacgcaggtaacattacagctcactggatgggttataccgaagcagtagctaaccagcctgctgaccaatttgaacaagttgtttatgacgctgcgactgatcaattcactggtccaaaaccagaaggcttaccaacaatggtaggttatcaagcttctggcgcagctcctttcttacgtggtgctccagtagaaaaaccggaaacagttgcaactgcgattcgtattggtaacccacaaagctggaaccatgcaaaagctgtagtacgtgactctaaaggttggttcgatgaacttcaagacagcgaaattttagaagctcaacgcttactttctatgtatgaaggtgtatttgttgagccagcatctgctgcttctattggcggtgcaatccgtgatattaaagcgggtaaaattgctgaaggttctgtcattgtatgtactgtaacgggtaatggcttgaaagaccctgatacagcaatcaaacaatgtgctgatgcagtgatgttgtcaattgatgcaacaatggaccaagtaaaagattcgattttatctaatatgtaaaatctgagtttttataaaaaacggctgtttaatacagccgtttttttatgctttttaaatggcataaaaaaacgcttctaaagaagcgtttttaaaaataattaaattaaatacgttttggcaaattacttaaccaaccgagcaagttagttgcatcgttattacgtgcctgagtacttggctcacccaataatacaatcactgctggacgtgagttcacagtagtatgcataactacacaacggcctgcttcattaatataaccagtcttagataagttgatattccaaccaccattacggactaaagcatttgtattatttgatttaagaacacgataacctaaattaaagtcataggtcggtgtggttgagaactgacgaatcaaaccatattgagatgctgtactcgccaaaattcccaagtcacgcgcagaagatacattacgcggatctaaaccagttgactcataataatgagttgcattcatacctaaagcacgcgctttagcattcattgccgccacgaatgcagcacggccacccggataagtacgcgctagagctgctgctgccggattttctgacttcataagagcaaacagaagaacttctgctcgattcattttatcgccaacacgaagtgttgagcttgaatttttcccgccagccccagcaaaatcaatttgctcaagtgtaatttcttcagacatgtttaaacgggcatctgccgttacaactgccgtcatcaatttggtaatagaagcgatcggcactgatgcgttggtatttttactataaagtacctcacctgtttgtgcatccattacaagtgcagcacgtgcactaacactcggctgggcgttataacccacagtatcacggattggagcaactttaggggtagaagtaataactctcggcgcattactgccacgcaatgttgtagttacagaagttgaaccttgcggagtcggttcatcatcttcatcatttaaaagttgactagcatccgctgcagaccaatttaaacttgcagtaccagtactccctgaagacgggttattgacgagttctgcaaagcttgttgaactcaaactaagcaaaatagacatgcttagcacatgcattaaagactttttagaatttttcacggcacaatactcgactcagggtgacacacatttgcgcttactatcattatgccttacatttgagatataaggtataaagcttttaccgacacaattgtgcacaactattcgctcactatagaagaataggattgctaattttgtcattccattgcaagcttattttgctttatgtaacaaaaaacttgttttttgaaagaaaggaggtcttcttgattacagttttagttgtcgatgaccatgaactggtacgtacgggtatttgccgtatgttagaagatcatgccgatgttgaggtaattggacaagccgaatcgggcgaagaagcaattgctatcgttcgccaacaacatccgcaagtcgtactgctggatgtcaacatgccaggcatcggtggtgtagaaacaacccgtcgtttattacagacggctccagagacgaaagtcattgctgtaagcggcctcgccgaagagccttacccatctttattattaaaagccggtgcaaaaggctatatcactaaaggcgcgccaattgccgaaatggttcgtgcaattaataaggtcatgcaaggcggtaaatattttagtgcagatattgccgaacaactcgcgagctcatatttatccgacactcaacaatccccttttgattcgttatcggaacgggaaatgcaagttgcaatgatggtcgtcaactgtattagcgcccaagaaattgccgataaactttttgtaagtgtgaaaactgtaaatacttaccgttatcgtatttttgaaaagttaggaattgatagcgatgtaaaactaacacatcttgcgattcgttacggtttgatcaaaccataaccaaatttacatgcaatttcccttaaattcatccttgtcccatacgatttttcgtttgggcacttggtatggcttataccgtcttattattgcggttagcctgaatattattttggttttaaccgatgcgcaaactgataacagtttgcagcaacctgccttatattcctacacactactcgggtattccctcttaagtcttgttcagctgttatgctttaaatttattgctactcaagccacgcgacagcttattttattttttattgttgatattatttgtttgagtttactgactttttctgtgggtgaaccaaatttacaactcagcttactctatgtaattgccatctttacctcggcgattttacttagcgcaagaatgtctttgctgattacattgcttgcggttatcgctgttatttaccaacgatttgtaggtagtctatttgactataacaatctaaatactattggtaatagcgctctcttagctttcttattttttgtggttcacggtattggccaaattgctgtgcagcgctttaaattacttgaagcactcacctttcaccagtcaattgaactttatcaactccaaaatattaaccgttatatcttagaacaaattgaagaaggctatttagttttagatgagaattacgacatcgttgtcagtaatcctgcggcctgttcactcttgggtattccccctcaatttgccaatgaaaaatatcctttagcaaagtggcatgccgatttatttgaaattttaaagtttggcgacttaaaagaaggtgaccgattcatttttgagtctcggctatcggcgtactccatcaacattaaagtgcaacatcttttggtcccacaacaaacgctaaccctgctcattttacaagatgcacagcagattaatcagcaagcacaacagcttaagcttgctgcgctagggcaactctcagcaagtattgcacatgagatccgcaatcctctcgctgcaatcgtacaagcaaatgagttactgaaagatagcgatccagaacaacaaaatactttgcgtcatatgattggcaaacaaaccaaacgtattgatagtattgttcaagataccttagggcttgctcgtagcgaaagaacacatcctatccagatcgatgtaaaacacttcatagttacattgctcgaagaagatttatttgacgttaaacattcaattcaacttaaaatttcggatagttctttaaaatttttatttgatgaaaaacaattaagacaagtcatgattaatctggtgagaaatgctttacggcataatgcccccgactcaccgtacattacgatcaacattcattcacagacaaataaaatttatattgatgtgatcgattacggtgaaggtgtttcaaaacgtgatatatctcaattatttaaaccattttttagtaccgaaattaatggaactggtttaggattatatttgtctcatagtttttgtgaggcgaaccatgcaaagctcacctatgtagagcaaaaacaaggggcatgcttcagaatagaatgcccaataatatattgatttttttattaggtttttggggaaatggcagaacagcaaccactggttttgcttgtagacgatgaagaagatttgtgccttttaatgcaaatgacacttgcacgaatggggattaaaacacatcttgcttatcgggttgaacaggccaaacaactcttcactcagtttcattacgatgcgtgtttaaccgacttaaacctacccgatgggagcgggatagatttagttaaacatgtctctcaaaattatactaatactcccattgccgttttaaccgcctacggcaatatggatattgcaattgcagcattaaaagcaggcgcttttgattttgtaagcaaaccggtcaaccaagtacatctagatcaattattacaaaaagccttgaatcggcaaaaagtagagcatgatgctgctgagaatgcgttagaaaataaattattaatcggccgttctctacccatccagcagctacgtattgcaattaaaaaaattgcgcgctcacaagcacctgtatttgttaccggtgagtctggaacaggtaaagaagtagttgctaacttagttcatcggctgagtaaccgtagtgaaggcccttttattgcgattaactgcggtgctattccaaccgaactcatggaaagtgagctttttgggcataaaaaagggagctttaccggagcaactcaagataaacaaggcctcattttatcggcacacggtggcagtttatttttagatgaaattgccgaattacctttaagtatgcaggtcaaactgctccgtgcagtacaggaaaaaaagatccgacccgtcggttcagatcaggaaatcgatgttgatttccgtgtgattagtgcaagtcatcaagatttagatttattggttagacaaggtaaattccgtcaagatttattcttccgtattcatgttatggacctcatattgccacctctacgtgaacgtggcgaagatgtccttttactagccaatcactttattcagaaaatttgtatggagtgggaaacgccacctaaacaattaacagaagcggccgaaacttatctgctacagcaacactttccgggtaatgttcgcgaattaagaaatatgattgagcgcgcaattaccttaagtgaagataccactatagatgtatctcatttacatcctgctccactaagagcaaatatttctaatccttttgcttcagctgctcaaagcatacaaaccactgtggcagctcctcaagtcgtaaaaaaattaccaagtgaaggcttagaacgttatttagaaaatattgaaaaagatattttactcaatgcactcaatatgactcattggaatcgtaccttagcagctaaaaaattaggaatgactttccgctctttacgctatcgtctgaaaaaatttggcttagatacggagacagaacaggaagtataaaatttattttctttttagaaggagatcggcaacacgatctagataaacttcctctttcatttctggaggtaagggataagtctggttaggctgaataccttgcccctcaatcatattaccatttggtgtgtagtaatgtgagactgtcatttgtagcgctgccccacttggtagagggaaaagcttttgcacaacacccttaccataacttttttcacccatgacccaagcacgttgatgctctttcattgcagcagtaaaaacttctgctgccgaggcagatcggtgattgattaaaataccaacttttatattttgaaaatcgttacctggcaaagcctgaaattgctgattgccttctgaacgactttttgtagagacaataatgccatgatttaaaaataaatcggctgactcaacagcagcagataacaagccgcctgggttatttcttaaatcaattaacaccgcttttaaacgcgaagaactattttcttcaattaaacgcttaatctcattggcggtatcttgttgaaatactctaatttttaataccaacacctgattgtgcaacatcacaggctcaatatcggtttcaatctttttattacggactaaactaattggactatttgactcttctgtttgtacttgaagcgtcgagcctatcgatccataaagcaaacctagcacctgatcatgtgtcagatttttaagttcctgattatcaatctttaaaatagtttggccatttcttaagcctagtttatatgagtcagaacccgtcttaaggtcacgaatcatccatttatgaacatgtgattcggggcttagtacaaaatcaactgaagcaagatccccttcagtatattgaatgagttgacggtattcttcagctgacaaatagcgggagtaacggtctagaccactgactaaacctttaattgcctgtaaaaataaagcatcgtccgatttttcatcgacatagttatcacggacgatcccatatatttgtacaaactgttgaatagactcaataggcacttctgcataactttcttctgattccggggaatcaggatgcagagacgataatttttcttttacaacaggagctgcaaaagcgagctggctgcaacacatcaatacgctaacaaaaaaagctttatatatattgtattgcagcatttagtcacctattgcttaagcagacaatgtaatgagattacgaccttgcatttcagcaggcacaggaatctgcattaagttcagaatagtcggtgcaacatcagcaagcacgccaccttctgcaatcgttgcttgggttggacccacataaataaaaggcacaagctctgttgtatgctgagtatgaacctgaccactttcataatcttgcatttgttcaacattaccgtggtcagccgtaataagcatatggccttttttcgccattacagcttcgtatacacgacctaaacatgtatcaactgcttcaacagccttaactgcagcatcaaatacgcctgtatgaccgaccatgtcaccattggcatagttcacaacaagtaagtcgtactcacccgagttaattgctttgactagctcatcagttacttcatacgcactcatttcaggctttaagtcatatgtcgcaacgtttggtgatggaattaaaatacgcttttcacctggatattcgtcttcacgaccaccactaaagaagaaagtcacatgggcatatttctcagtttcagcaatacgtaattgcgttttacctaaagaagataaatattcaccaagcgagttctttaactcttcaggcatatatgccacaggtgcatcaatgcttgcctgataacgcgtcaacatgacaaatttagaaaggttcggtacaactttacgctcaaaacctgcgaaatctttttcaacaaacgcacgcgtaatttcacgggcacggtcagcacggaaattcataaatacaacgctatcgccatcttgaactttagcgatctcaccaatacgggttgcttttacaaactcatcattttcatttgcagcatatgcaagctctaagccttcaaccgcagtagttgcagtacgaacagcttcaccttccgttaataaacggtaagcctgctcaacacgatcccaacggttatcacgatccattgcaaagtagcgaccaatcatggttgcaatacggcccttgccttcatattgagcgaataaagcatctaatttttctaatgaaggttgagcactacgtggaggagtatcacgaccatcaaggaatgcatgtaagtaaactttcgcaccgcgttttaaggcaagttcacacatcgccacaatatgatcttcatgtgaatggacgccaccttctgaaagtagccccataatatgaactgcaccacccgctgcttttgctttttctacggcatcaaccaatacttcgtgctcaaaaaaagcaccagtacgaatatctttagtaatacgtgtgaagtcttggtataacactcggccagcgccaaggttcatgtgaccaacttcagagttacccatttgtccatcaggtaaaccaacatcttcaccagaaccagaaatgagactatttggatgctttgctttcattgcagttaaattcggggtttttgctgcaagaaaagcattatcttcaatcgcttcacggtgtccaacaccatccataatgaccagaacgtgagggatcttgccagcagttgcatccgtcataatcaatttctcttttgtctacaatttcatcgcaatatcttaccgaattttcggtgaagactctattttttcctatggctttccccaatgctcctcattgagaaagtcattcatatactttcaatttaacgggcccgataaagcaaataacttccggcaccaaacattaaaataataggcatgagtacaaaccaagctggtgaaggcgcgtataccaaacttgcgtagcccaagaagtcttgtaaataataaaagcctaaaccaatgaagagcgcgatcaccaaacggaaacccatcgactgttgacgtagtggaccaaaaataaaagaacaagccactaatacaagagtaatgagtgaaaatggagaagcgactttttgccaaaaagctaattggtaagttttcggtacttggctatattcgtccatataacgcataaaactaatcagctgacttggagacaagtcctcagggtctaaagtcaccatatgtacatatttaggctgtagagccaaacctaaagactgctgatcatgattatttagtatcgaattaccatctgtaagaatgtccatctggctggctttttgtaaagtccattgaccatcctggataaactttccttgctctgcattaattaaagactgtaaatggtagtctttgttaaagtctacgacctggatatctcttaaatttccttgtgagttcgcataatcaatataaataaaacgctgcccttctcgtgaccaatagcctttcacttcacctaaagcagcaactgatcgatggcttttgacactttgtgctttctcatttgtatagggaacaacccactcacttagagcaaaagataaaacaataagcagcaaagctgagcgcataacccaacctacaatacgccataagctaatcccgaccgaacgcatcacgatcagctcactattggatgctaaagcgcctaacccaatcacagcgccaattaaggctgagataggtaaaatttcatatagatagcgaggggcaccccataacacatagataaaagcttgccatgcattatagtcaggttttagctcacctaattcacccagataagtaaacaggatttgcaaaacagacaaaacaatggtggtaccaaacattgcgagcgcagtggttttcgtcacatatttggcgactattcgacgtgctaacattataatttcactcgcttaatctgtttcttgattttcggccctaatttctgcttacgtgaaaataaggcagctgcgattgcataaaccaataaagccactggataagcccaaatatccagttctcctttacttatacgagttttaattgcaatcatgagtacgatcaaactcgcgaaaataaagatagatggaataagacgataataacgaccttgtcgcgggcttacttccgacaatgccacagatagcatcaaggcaataataatggtaaacggaccaaataagcgccagcccaactcacttcttacgaccggatcatttgctttagaaaatagttttgatgtggaaagtgcttctacatcgccactctcaaacttaacatctttgtcattttctaaacgtagacgataagactggaactctgcttgtgtatattttggttgtcccgggaatatttcatagcgacgaccttgaacgagatcaaccacattggctgtatcattcgcgacctcaacacgagtcgcctcttttgccaaaatcatgacatctggcttgccttctttggctgcacgctgataaaagaaaatatctttaaggttttttcgatcttccgacaatgaacccgcataaatcgtataaggtccagaagaaataaactctcttggtcgcaccaagtcaaaccctgtacgcactgcttgagttgtagttaatttttcgaattcacgaagtccccacggcgtcatccaaagcataagtacggactgacacaccatgtaaaccagtgtcattggaataagtaagcgcgctaactgatgacgacttaccccactaccattcaatacggccatttcatggtcaacatataaacgaccaaacaccaacattaaaccaataaaaaacccaagtggtaaaatgagggttagaaattcaggtaaacgatatccaatgatgctaaacaagatactggcatctagtcgcccctgtgccgccacaccaaagtatttgatcagacgaccacccatcatgattaaggtcaataatgcaatgaccaccaatgaggtagagacaacttgcttgacgagataacgccgaataatcaaattaatacttccaaaaggctaatcgggacgaacgctagtttacccgaatgttaaaaatataaaaccgcacattgcaacgctatgcttgaaagtgtttcaatgtttcaatccaacataactttctataggcaatcacggcagccatgaaatttacaacttatacaacttttcctgaacaaacatctaatgaatctttgtggattttagttgattcagaacagctacaaagcaatctcaatacatatcaaatcaataatctagaaagtattcttacagcaactcaatttaaagccaacttcaatgaaacgttgccattatttggtcaacttagcactcagccccatagccaattacttggtttaggaaaagcagctgaacttcaagcagctaagttagcaaaattggcgcaaaccattatcaagtcggcacaaaataaatttaagcatatcgcaattgatattgctgcgttacctgtcgaataccattatttatttgcattaagcttaactcaagcagcttatggttatgatgagtttaaatcgaaaaaaaatgaatttgtgttacaacaagttgatttaattagctcacaaaccagccttgatgaaaatcaactcgctttagtacatgccgtacaatctggtcagtcttatgctcgtgacttaggaaaccgaccaggtaatatctgtttccctgaatatctggcagaacaggcattagctttagcggcagaattcccagacttacttaaagtcactgtcttaaatgagcaacaaatggctgatttaggcatgtatgcatttcttgcagtcagcaaagggtccgagcgtccgggccgtattgtgactcttgaataccaagcacaacttgaacaagctcctgtcgtacttgtcggtaaaggcgtaacctttgatacaggcggtatttctttaaaaccagggcttggcatggatgaaatgaagtttgatatgtgtggtgcagcttctgtactcggcacaatccgtgctttatgtgaggcacgtcttccaatccatgttgtgggtgcgattgcagctgcggaaaatatgccttcaggtaaagcaactcgcccaggcgacattgtaacaaccatgagtgggcagaccgttgaaattttaaacactgacgctgaaggccgtttggtcctttgcgacaccttaacgtatatcaaacgtttcaatccggcagttgtgattgatatcgcaacattaactggtgcttgcgtagttgcgttaggtaaagtactgagtggtttattctctccggacgatactttggcagcggaactccaacaagctggtgagcagtcatttgaccgtgtatggcgcatgccagtgattgatgattatcaagaactattggactctccttttgcagacatcgctaacattggtggaccacatggcggcgcaattacagcagcctgcttccttgagcgttttactcgtgactatcgctgggctcacttagatgttgccggaacagcatggttatcaggctcagcaaaaggcgcaactggtcgtccagtaccgctacttatgcaattcttggctaaccgtgtaagtacgaatggctaaagttagcttttatctgtttgaaaccagtgaagaacggcaagtcgatagtgcttgccgtttatgccgaaaaattttactgaagcattcacaaatctggtggtattgcccagatgtgcagttacaacaaacacttgatgaaaaattgtggagctttgatccgaccagctttattgcccatggcgttgatcaggtagatgcggcagtatgtatttcggctaaacaaccttctgaacaaggttggctggtatttaattttaacaatcatgcacttgaacaagtgaatcattttagccacattatagaaattgttgaaaataatgaagcagccaagcaaattggccgagaaaaatttaaaatgtatcgtcgtttaggtatagaacctcgaacctttaaattataacgcgctaaaatgtaaatactgttgagcaaaggagaactgtggtggcattaaatgtcgggcaagattttaaaaaaagatggttaaatgcgcctgaagctgtccgtcatgcttatcaacaggatttggctcggatttgtgatttattagagcctcagacccctattcaactgtgggttttaaatgacgaaaaagcgcaattagaatcacaacaaaatattgaaaaggcatatgctgacttaaaggcagagttaatcgagcaagcgcgaattcgtcgccagcttgcgttagaaaaagctcttgcagataagcgcgcaaaggaagcagcttatgctgctgaattacaagctgacgaagttcgtaaatttagtgaacaaacggaagctttgcaggctttacgcagtcatttagaacaagaagttgctgaacatactgcacgttatcagaaaaaccctgaaacgccagcaattgattattcttctggtgcaaaacttagcattactgacgatcaaatcttatctgagcttgaaagtgtacgtgttcgcctagaacttgaagctgaaagcttaattgaacaggcagtaacagttttccgtgccaaactgcatgctgcggctcaagaagaaattgaatatattttaaagaattctaacttttctgatgaaaaaatagaaaagtaaagttttaatattcttcctgtcataaaaatgacatttaattgtcacaaaatggtcatgcataatattcttatggttcaagcaattataagaataagtcatgattatttatgaaaattaatgagggtaagaaatggacattccgcatcagatttcaacgcaaattgagcaacttaatcaaggcgagcaatggaccttctcagcacaagaactttatatgagtcataacgactttaattcactttcaatcttactcacacgagcatcggaaaaaggcgaattttcaattactcgcactcagcataataaaccttgggtcggcacacactcagttactctcaccaagcattaatttttaaaataaaaaaaccggaacgtatgtccggtttttcattttggcaatttaaaaatttattttaaaaaaccattttcagctaagaaagccatactaatatttgattcggttttctgttcagcagctttatcacctagtaataagcgttcgatataacgtgctaaaacatcaacttcaaggttgaccttgctacccacttgccacgttccaatattagtacgctctgctgtgtgtgggattagatttaaacttaaaatattaccgcgtaaatgattaatcgttaagctaataccatctacagttactgaacctttctctgccaaatatttagcaagttctacaggcgcagtcacttcaaaataaattgagcgagcatcttcacgtactagggtaatttcacctacaccatcaacgtgaccacttacaatgtgtccaccaaagcgggtagtcggtaacatggctttttccacattgacacgttgaccaactttccagttacccaaagtcgtgcggtttaaactttcacgggacacatcagccgcataccagttatcaccccactcaatcactgtgagacagatcccgttagttgcaattgagtcacccaaatgtacgtcagacatatccaaatcggtttgaatacgtaaacgtacatcgccacctacactttgcaggctttctactttacctaaactttcaataatgcctgtaaacatggctcaatctccaaatcttttacactgcttaaattgcagcgcttaccaaagtgcgagctgtgtactattacctgatgtatctacaccacctagctcggcgaagtggtaaagctggcctaacaattgacgtaacggtggccctggtttggcatgagtatctgtaatcacaataaactcaagcacacgtgcacgctctgactgacgttgtttacttacgcgataacgtggaacatcttgagtaagtaaagtcacttttccacgttccagattggccatcagtaaatctttcggctcaatgttaccatcggtcgaataactggtcagaatataacgtgcattgatggtcgaaagtaatttttcatacgcatcttttgcatgtttagaagagttataaggacttggacgttctttacgccatgcacggtcaataccactcttatagcctttcgtatctggcggtggtaaatcgacttgatcccataacgtcaacgcatttaaaacgtgatagttactactgtaagcatgctgattataaggtgggtcaagataggctacatctacttcaaaaccgctcatctgatttgctagatgctgagcatctacacaccacatttcagcagcagggcgtttacggtcgccaatctcacagaaacggctcggtgttaaccaaagtagtgattcgatacgctctaacgctgtttgtgtacgtccgccccacccttggtggaagcttttaaatacaccactggtattactcacaaaacttgctgaatagagtaatggcgcaagcaaagcactcatttctacatcattaattgcaccttgcgcttgccatgtggcaatttgctggcgaatcgcatcgatgcgcataccattgcgacgtttaaagaataaacggtcacgagatggatcatagacatcatcattacgagggcaaagattgtgtgttacccagcctttaacctcgggtaagcggtttaaataatcaatcgctttctgatagccacccaactctttaaaagcaggtgcatcgacacacgctaaaattgcatgatttaaagcatgactataaggttcccagtcattcgcaatgacacggtatccattttgacgtgctaaacgagaaaccaccccactgcctgcaaaaaagtcagcaaaaatcggggggttctttttcttgctattcagcgtccctgtgatttccagagcttctaaaatcaagtggagcaatcggcgcttgttacccaagtacgggacaagctgatggaaaagatattcgtctgtcgtgcgggctgcatgacgacgtttgtggtataccgaaggctctgaattcatactttctcttgcgtagggattaaccttaagcgtatatcttgatcaagttgtgttacatcaagaagtttaaaacgaagttgctgtgccatatattcaaaatctgcattgaacatggctcttgcactttgccccaataaagttggagccacataactgatcatttcatcaatcaagccttcttgcaaaaaggcacttgataatgtcgcgccagcctcgatcagcacatcataaatttggtattgcttagataaggtctgtaatagtgtttttaaaggctgaatttctaattgtatcacgcctaagtcagcaagttcctgacgatatggccccatgaccatcacagtttcaggattttctaaaattttagcggtgagcggtaaacgccctctccgatctagaattacacgttttggctgagcaaccgtttcgatatcaacattatgaagtgaacgtacattaagttggcagtcatcggcaattacagtttcaatacctgtaatcacggcgcctgaaatcgcacgccaatgttgtacatcttgacgggccgcagaacctgtaatccacttcgactcaccagatgccatcgcagtacgtccatcaagactagaagcaacttttaatcgtacatatggcatgccggtagacatcgcttttaaaaagccttgattaagttgagctgccaaatcttcacaaataccgatttctacttcaataccggcattttttaatatctgaacacctttacctgcaacaagcgggtttggatcaggacatgccactaccacttttttaacttgcgccttaaccagcgcctcagcacacggaggggttcgtccataatgagcacacggctcaagcgtcacataagcagttgcgccttgtgcctgttcgcctgcctgacgtaatgcaaaaacttccgcatggggctgaccagctttagggtgaaaaccttcaccaattaactgatcatctttgacaatgacacaaccgacatttggatttggttttgtcgaatagagtcctcgtttggcaagttcaatggcttgctgcatccagtattgatcttgttttaactcagacataaaaatctcaaatgattagtgctcacgttgttgcatttgctcaatttggcggcgaaacgcttcaacatcctgaaaatcttgataaaccgaagcaaaacgaacataggcaacgtggtcaagtgcaaataaagattgcatgacaatctcaccaatcgttctggatttcacatcacgctcacccaaacgacgaatttgcaactgaatatcgctgagaaccgtctcgatctgctcttgtgtcactggacgtttttgtaaggcatgcataagcgaacgacgtagcttcgcctcatcgaacggttcattttttccattcgatttgatcacacggggcatcaccacttcatagctttcaaaagtggtaaaacgttcaccgcaacttacacactcacgacgtcgacgaatctgacagccttctgcggctagacgcgaatcgatgactttactatctgcggcgttgcaaaatggacaatgcatagcggacttaatagggtcaattactttgacctagtgtagcaaaatttctacacttacagaaccagcattctatgagacaaaaaacagccctgtccgagatcaaagcatcgctttgatcacagcacaagactgtttttgatataagaattattagtgattattcaatacgttcgccatgttggcttaagtccagacccatacgttcatcatcggaattaacacgaagtccaatgataaggtcaatcactttaagaataatgaaagttgcgataccactgtaaaccattgtcgcaagcacaccttcgacttgtacccacaactgaccagcgaatgttggtgctaatgctacgttggccgccttaatgatttcatcactataaaatacgccagttaaaatcgcaccgacaataccacctacagcgtgtaaaccaaacgcatccaaagcatcatcggctttaagtaagcgtttaagtgccgtaataccccagaagcagactacgccaccaataaggcccattactaaagctccgcctacaccaacaaaaccagctgcaggcgtaatcacaactaaaccagcaacagctccagacgcaccgcccaatacagaagctttaccacggatcatacgttctactaccaaccaagagaacgcagcagcagcggcagcaacttgagtcactaaaattgccatacttgcacgagcaccagcacctaaagcactaccaccgttaaagccgaaccaacccacccaaagtaaacttgcaccgattacagttaaagttaagttatgtggcgccatagattcacggccaaggccaatacgtttaccaagcatataagcagcaactagacctgcaacaccagagttaatgtgtacaaccgtaccgccagcgaaatctaatgcacctgctttaaataaccagccatctgccgcccatacccagtgagtaattggtgcataaaccacaagcacccaaattgcaatgaatgccatgaaagctgaatatttcatacgatcagcaatcgagccactcaaaattgcgacagtaatgatggcgaaagtcatttggaaaataacaaagaggctttcaggaattgtcccacttagtgcatcaaaagcgacgccattgagcattgctttagacaaatcaccaaagtatgcacccgtgccagagaacgcgattgaataacctgcaatcacccagagcaaacttactaaaattgcagcagaaaggctaaacatcatagtgcttaagacatttttcttacggaccataccaccgtaaaataacgccaagcctggaattgtcatcaacagaaccaaagctgttgaaattaaaatccaagatgtatcaccggtatcgagttttgcagtcggtgtcggagcggccggagtttcctcagctgctggtgccgctgcaattgttgcaggagcttcagacgttgatgttgctgtaacctcagatgttggtgttgttacagtctcttctgcccaagcggcagtaccacccaaaagtgcgccggttaaactcagcgccataagcatttttttcattcgtgtcccccaacctcatttgcgagctatttattgctcagcaagctttgtgccaatttagacagcatctggtcctgtttcacctgtacgaatacggatgacttgttccagattagtcacaaaaatcttaccgtcgccgatttttccagtgcttgccacacgtgtaattgactcaattaccgcgtcgaccatttcatcactaatcgcaatttcgatttttactttaggtaagaaatcaaccacatactcagcgccgcggtaaagttctgtatgtcctttttgacgaccaaaacctttaacttcagttacggtaatcccttgtacaccaatgtcagagagtgcttcacgcacatcatccaatttaaacggttttacaattgcagttacaagcttcatgtttgtttccttcggcttcttttcaccagtaaggttttatgttcaattttcatgccaatatttcaaaggttggaggatatgaatcttttgcatgagctttctttataacctatttagttatcaagatgtagatgagcaactaaaaataaaatgaattttcagtcctgtttttatttcaatttatcgttatgacatggctaaaagccaagaagcctatatcctagattcaagcagtgttaaactggcgagcataaggtaatacaacagtttggatatctcatgctagaaactctattacaggccatcttggaacaaattgacgagcctaaaaaagatttagaaaaaaacttacgtgcattattaaatgaaactgtcgagaaattagatcttgtctctaaacaagaaatcgaaagacaaaaaacagcccttcatttagccaatcaacgtttagaagcgctacaaaaacaagtcagtctattagaagaagctttaaagaataaaaaataagcaccaacgtagcgcacttatactttacaacgattaaaaatgaagcaccataatggaacaataagatgtctttttctaaaatttatactcggggacttttaggattacatgcgcctctcattgaggttgaggtgcatgtgagtcaaggcttaccctctctgactattgtaggcttagcggaagcagcagttagggaaagtaaggatagggttcgctcagctattattaacagtggatttcaatttccaactaagcggctgaccattaaccttgctcctgcagatttgcccaaagatggttcacggctagatttaccaattgctttaggcatcttaattgcctctggtcaacttccggaaaactgcacagaagactttgaatttattggagagttggctctagacggtcatgtaagacctgtgtcaggcgccttaactttagcaatggcatgccagcaagctcagcataaaatcgttttaccagtcgataatagccaagatattagccatttacctaatcttgagtgttatccggttaatcatttaaaagaggtgtgcgagcactttttaggcacacaaaagctagctcacgcacagccaagtgaccattcaaatgaaatgccctataaatttgatcttgcagatgttaaaggtcagctacgcccacggcgtgcactagaaattgctgccgctgggggccattccctgctctttaaaggaccaccaggcacaggtaaaactttattggcctcacgcctgccttccattttaccgccactttctactcaagaaactcttgaagttgcaagtatttattctatttcaaatacaccacatacttttgggcagcgtccatttcgcgcgccccaccatacagcatcagcaattgcactggttgggggcggttgtcagttccacaaataaatcagagtttacacaaataaactagagcaagaataaaaagtatattatctataagctttaatttttcattttgtaaaaatatatgcctgttaataatgataaaataacgactattgattgtttcccaaatgataatattagtcgagtggtttatcgatatggtggactcgttcgaaacgaagataacgactcaactaatccttttgttgaagtgttattaattgagattagaaaaagtgatcaatggttatttttagataagtgctcaacattccttgttcccgtacttgatcttgatgctgttcaacatggcagtatttgggacgggaatgttctgaccaattacacttatagattttcaggaaaactcatcacaaaacgattttctttcgacttcagcaataataaaccgaggaacataaaactttcagacaaaattccggatacgtcagagtactacattccattaaaaaactattttcttcccaataaagttgattatgttctacaaggctatccattcactaaatacaccaatgattcatatcggaaagtgaatcactgcttaatgcattctaatgatggaactcaagtcatcacttcctcaatccatattttgcatagcttattcgtcaatcggaaggatattcggggactcttattaagcacttcaggccaatctatcattaaccgctttttagaatcttatacaacagaagttgagaatgataatattgaatataaaataaaaatcagaaagccatatgaagatattggcgaaacagcaattatatttctggctaatctagccttaaatccatatgtgcagacgatagtcgataaaattcaacgaagtatggaagttactgagtttcatcatcttcagcatggcacaggcataagataccccattgtatatccgccacatcctacaaagctttttcttgaagcagaaggaatttggctagatgacaataagacacgtttttttattactagagtgaaaaaatttgatcctattaacgatcacatgattgatgtcaataaagaccttaccaatactgtttcaaaaactgatgaaaaaaaccctcgtcctcgtgaaaaaagtcaaaataaaaatgagcatatcaatacacaaaaaccaccatcaagaacaagcggtgaataccgtaagcgttctgatgtggaaactggaaatacacaaaatattttgaagtattcttttaatgaaccagccaatgacccaattgaagttggcacatccaatcatccatattcagataaatcagaggatgttgaaacatcatctgatgaaccatatggcaataaaaatactaaaactaaaaagtctgaaacaactgataatccgcctagcagagatgaacgctttgatattcaatatattattcaatcacttaaccatttaacactagatacaacctctccattagaacgtgtgtattcaattgatatattggggaatgagatacacggattcaacttacttcaaataaagaaactcgttcctcaaccaaagcatccatcttggattgatgcagaatttggaaggaaattgttatttttaaaactggaattgaaagatcagcatgatcaatattatttaattgatatacataaaaataaaagccatgaagcattctgtgcttttattatcgtgtcaccacataagttaacccgtgagcaaataaaaaatatatgtatagagcttgagaatgcaaaaggaattaaaaaatggacgctacgttgtgaaagttttaccaaaaaaattatttcgattaaacattcatctgctactcccgatgagtggaaaaatagatttaaaaatttattttcaacattaattaattgatttttattaaattacaaaaaactgtcgtactaaaaataagaaaggtacttcataaaggagttgcaagaatcctaacctttttttacaattcaatagttgttgaaatattgaaatattatttctaaagtaaccgtgcatcggaagttaatatttctagtattgtttcctgtcataagcatcaaggtcttagctaataatataaattagctcatttgatacttttcaaacttaatctccgtcgatataaatcaattaatatcaatatcttgaagataggaaatgcataatcagtgttcgtttcaagaatcattagcattattatttaaggtttagctatcctatgtacttatctgatttaaacgcacaacaaagggaacctccattgaatcgaactaatatttttttggtgaatcgcattctgactggttgcctgtcagaggcggagaatctggtgattttgtttttcgacgtggtgacgggcatgccttcgcgaaaatcgcacctgcttcccgccgcggtgagctcgctggagagcgtgaccgcctcatttggctcaaaggtcgaggtgtggcttgccccgaggtgatcaactggcaggaggaacaggagggtgcatgcttggtgataacggcaattccgggagtaccggcggctgatctgtctggagcggatttgctcaaagcgtggccgtcaatggggcagcaacttggcgctgttcacagcctatcggttgatcaatgtccgtttgagcgcaggctgtcgcgaatgttcggacgcgccgttgatgtggtgtcccgcaatgccgtcaatcccgacttcttaccggacgaggacaagagtacgccgcagctcgatcttttggctcgtgtcgaacgagagctaccggtgcggctcgaccaagagcgcaccgatatggttgtttgccatggtgatccctgcatgccgaacttcatggtggaccctaaaactcttcaatgcacgggtctgatcgaccttgggcggctcggaacagcagatcgctatgccgatttggcactcatgattgctaacgccgaagagaactgggcagcgccagatgaagcagagcgcgccttcgctgtcctattcaatgtattggggatcgaagcccccgaccgcgaacgccttgccttctatctgcgattggaccctctgacttggggttgatgttcatgccgcctgtttttcctgctcattggcacgtttcgcaacctgttctcattgcggacaccttttccagcctcgtttggaaagtttcattgccagacgggactcctgcaatcgtcaagggattgaaacctatagaagacattgctgatgaactgcgcggggccgactatctggtatggcgcaatgggaggggagcagtccggttgctcggtcgtgagaacaatctgatgttgctcgaatatgccggggagcgaatgctctctcacatcgttgccgagcacggcgactaccaggcgaccgaaattgcagcggaactaatggcgaagctgtatgccgcatctgaggaacccctgccttctgcccttctcccgatccgggatcgctttgcagctttgtttcagcgggcgcgcgatgatcaaaacgcaggttgtcaaactgactacgtccacgcggcgattatagccgatcaaatgatgagcaatgcctcggaactgcgtgggctacatggcgatctgcatcatgaaaacatcatgttctccagtcgcggctggctggtgatagatcccgtcggtctggtcggtgaagtgggctttggcgccgccaatatgttctacgatccggctgacagagacgacctttgtctcgatcctagacgcattgcacagatggcggacgcattctctcgtgcgctggacgtcgatccgcgtcgcctgctcgaccaggcgtacgcttatgggtgcctttccgcagcttggaacgcggatggagaagaggagcaacgcgatctagctatcgcggccgcgatcaagcaggtgcgacagacgtcatactagatatcaagcgacttctcctatcccctgggaacacatcaatcttaccggagaatatcgttggccaaagccttagcgtaggatttcgccctctcccgcaaacgaccccaggaggaaagggcatgaagaagccgaaccaagacgacgagccgtttttcatcaccgaggagattgcggccgaaatgatcgccggcggctatgagttcgagctgccgcccattccttgcaccatccgcctacgcgacgtgctggagcgcatgaccgatgctgagctagcattgcagccgggcgagatcgccgaccaggagcgtgaacgctgccggcgcaagccgtgttcaacctcatgatctggtcatggtatttttcatggcactgagcctgatagttcttgcaaattgttgtcactaaagggttttgtgtgcttgtttacaatcgagtgggagtgacgggcactggctggcaatgtctagcaacggcaggcatttcggctgagggtaaaagaactttccgctaagcgatagactgtatgtaaacacagtattgcaaggacgcggaacatgcctcatgtggcggccaggacggccagccgggatcgggatactggtcgttaccagagccaccgacccgagcaaacccttctctatcagatcgttgacgagtattacccggcattcgctgcgcttatggcagagcagggaaaggaattgccgggctatgtgcaacgggaatttgaagaatttctccaatgcgggcggctggagcatggctttctacgggttcgctgcgagtcttgccacgccgagcacctggtcgctttcagctgtaagcgtcgcggtttctgcccgagctgtggggcgcggcggatggccgaaagtgccgccttgctggttgatgaagtactgcctgaacaacccatgcgtcagtgggtgttgagcttcccgtttcagctgcgtttcctgtttgccagccggcccgagatcatggggtgggtgctgggcatcgtttaccgcgtcattgccacgcacctggtcaagaaagcgggccatacccaccaagtggccaagacgggcgcggtcaccctgatccagcgttttggatcggcgctcaatctgaatgttcacttccacatgctgtttctcgacggtgtgtatgtcgagcaatcccacggctcagcgcgtttccgctgggtcaaggcgccgaccagcccagagctcacccagctgacgcacaccatcgcccaccgggtgggtcgctatctggaacggcaaggcctgctggaacgggatgtcgaaaacagctatctggcctcggatgcggtggatgacgacccgatgacacccctgctggggcactcgatcacttaccgtatcgctgtcggttcacaggcggggcgaaaggtgttcactttgcaaactctgccgaccagtggtgatccgttcggtgacgggattggcaaggtagccgggtccagcctgcacgccggcgtggcggccagggccgatgaacgcaagaagctcgaacggctgtgccggtacatcagccgcccggcggtatccgagaagcggctgtcgttaacacgaggcggcaacgtgcgctaccagctcaagacgccgtaccgggacggcaccacgcacgtcattttcgaaccattggatttcattgcaaggctggccgccctggtaccgaagcccagagtcaacctaacccgcttccacggggtgttcgcacccaacagtcggcaccgggcgttggtcacgccggcaaaacggggcaggggcaacaaggtcagggtggctgatgaaccggcaacaccagcacaacggcgagcgtcgatgacatgggcgcaacggctcaagcgtgttttcaatatcgacatcgagacctgcagcggctgcggcggcgccatgaaagtcatcgcctgcattgaagaccctatagtgatcaagcagatccttgatcacctgaagcacaaagccgaaaccagcgggaccagggcgttacccgaaagccgggcgccaccggctgagctgctcctgggtctgtttgactgacgagcctgaaggccaacgataccaatcaaaatgctgcgttcacagcgccgcggcagggatccgccgtgctggttgtcggaaaaggagccgctagtgggaaagaggagggtaaattttcagcgttgctggctccccgtcagccggattgggttgcatcgcaggggtgtcgaaagagtcaactgcggtccaaagctgttggacttgggtgaaaagggcgtttattcttcctatacgttgatggggatctccttaaaccatggcgtacatgccaaagtttccacgccagtgcatttacgaaaagcacgtacttgctatgatcatttagctggcgaagttgccgttaagatctatgattccctttgtcaacagcaatggatcactgaaaatggttcaatgatcacattaagtggtattcaatattttcatgaaatgggaattgacgttccttccaaacattcacgtaaaatctgttgtgcgtgtttagattggagtgaacgccgtttccatttaggtgggtacgttggagccgcattattttcgctttatgaatctaaagggtggttaactcgacatcttggttaccgtgaagttaccatcacggaaaaaggttatgctgcttttaagacccactttcacatttaagttgtttttctaatccgcatatgatcaattcaaggccgaataagaaggctggctctgcaccttggtgatcaaataattcgatagcttgtcgtaataatggcggcatactatcagtagtaggtgtttccctttcttctttagcgacttgatgctcttgatcttccaatacgcaacctaaagtaaaatgccccacagcgctgagtgcatataatgcattctctagtgaaaaaccttgttggcataaaaaggctaattgattttcgagagtttcatactgtttttctgtaggccgtgtacctaaatgtacttttgctccatcgcgatgacttagtaaagcacatctaaaacttttagcgttattacgtaaaaaatcttgccagctttccccttctaaagggcaaaagtgagtatggtgcctatctaacatctcaatggctaaggcgtcgagcaaagcccgcttattttttacatgccaatacaatgtaggctgctctacacctagcttctgggcgagtttacgggttgttaaaccttcgattccgacctcattaagcagctctaatgcgctgttaatcactttacttttatctaatctagacatcattaattcctaatttttgttgacactctatcattgatagagttattttaccactccctatcagtgatagagaaaagtgaaatgaatagttcgacaaagatcgcattggtaattacgttactcgatgccatggggattggccttatcatgccagtcttgccaacgttattacgtgaatttattgcttcggaagatatcgctaaccactttggcgtattgcttgcactttatgcgttaatgcaggttatctttgctccttggcttggaaaaatgtctgaccgatttggtcggcgcccagtgctgttgttgtcattaataggcgcatcgctggattacttattgctggctttttcaagtgcgctttggatgctgtatttaggccgtttgctttcagggatcacaggagctactggggctgtcgcggcatcggtcattgccgataccacctcagcttctcaacgcgtgaagtggttcggttggttaggggcaagttttgggcttggtttaatagcggggcctattattggtggttttgcaggagagatttcaccgcatagtcccttttttatcgctgcgttgctaaatattgtcactttccttgtggttatgttttggttccgtgaaaccaaaaatacacgtgataatacagataccgaagtaggggttgagacgcaatcgaattcggtatacatcactttatttaaaacgatgcccattttgttgattatttatttttcagcgcaattgataggccaaattcccgcaacggtgtgggtgctatttaccgaaaatcgttttggatggaatagcatgatggttggcttttcattagcgggtcttggtcttttacactcagtattccaagcctttgtggcaggaagaatagccactaaatggggcgaaaaaacggcagtactgctcggatttattgcagatagtagtgcatttgcctttttagcgtttatatctgaaggttggttagttttccctgttttaattttattggctggtggtgggatcgctttacctgcattacagggagtgatgtctatccaaacaaagagtcatcagcaaggtgctttacagggattattggtgagccttaccaatgcaaccggtgttattggcccattactgtttgctgttatttataatcattcactaccaatttgggatggctggatttggattattggtttagcgttttactgtattattatcctgctatcgatgaccttcatgttaacccctcaagctcaggggagtaaacaggagacaagttgtcagttccacaaataaatcagagtttacacaaataaactagagcaagaataaaaagtatattatctatatgctttaatttttcattttgtaaaaatatatgcctgttaataatgacaaaataacgactattgattgcttcccaaacgataatattagtcgagtggtttatagatatggtggacttgttagaaacgaagataacgattcaactaatccttttgttgaagtgttattaattgagattagaaaaagtgatcaatggttatttttagataagtgctcaacattccttgttcccgtacttgatcttgatgctgttcaacatggcagtatttgggatggaaatgttttaaccgatcaatcctatcggttttcaggaaaactcattacaaaacgattttctttcgacttcaccaataataaacctaagaatataaaacttacggacagaatccccaatacttctgactactacattcctttaaaaaactatttcctcccaaataaagttgattatgttcttcaaggctatccatttaccaaatataccaatgattcatatcgcaaagtgaatcattgcctaatgcattccaatgatggaactcaagtcatcacatcatcaattcatgtattgcatagcttattcgtcaatcggaaggatattaggggacttttattaggaacttcgagtcaatccatcattaatcgttttttagaatcttatacaacagaaattgtggacgataatgttgaatataaaattaaaatcagaaagccatatgaagatataggcgagactgcaattatttttcttgctaatcttgccttaaacccatatgtgcaaacgatagttgataaaattcaacgaagtatggaaattaccgagtttaatcatcttcagcagggtacaggcaaaaggtatcccattgtgtttccaccacatcccacaaagcttttccttgaagcagaaggaatttggctagatgacaataagactcgtttttttatcactagagtgaaaaaatttgatcctattaacgatcacatgattgatgtcaacaaagacctgaccaatacaatttcaaagcctgatgagaaaaatcctagacctcgtgaaaaaagtcaaaataagaatgagcacatcaatactcaaaaaccaccatcaagaacaagcggtgaatatcgtaagcgttctgaggtggaaactggaaatacacaaggtattctgaagtattcttttaatgaaccaaccgatgatccaattgaagtcggagcatctaatcaaccttattcagataaatcagaagaggttgaaacatcttctgatgaaccctatggtaatcaaaatactaagatcaaaaaatctgaaacgacagatacaccacctagcagagatgaacgttttgacattcaatacattatccaatctctccaagaacttgcttctgaaatgggttctcctctggaacatctgtctgcaattaatgaacatggtgaaatgatagcgagtattaatttgcttcaaatcaaaaaacttgtgcctgaacccaagcatccctcatggattgattatgataaagggcgaaaattattgttcttaaaattagacttaaaagatcaaaatggattttcctatctcatcgatatacataaaaataaaaatcatgaagcattttgtgcctttcttatttttactcagaataagttaacaagcgaacaaattaaaaaaatctgtattgaactagaaaatgccaagggaataaaaaaatgggcactctactgtgatagtttcattcataaaatgattgcaataaaacatttatacgcaacaccagatgaatggaaaaatcgctttaaaaatttattcataagcttacagaaggacaaatcctaattaaagaatattttttatacaatcatatgttcatgaaattacttggtatttcatgttttctataaatttgcgaaataaaaaagagtgaaattttcgttcagttcgcctatactaacagttcaatttaaatttctattcgtattcacacacttatgcttttgactccaccctagtttatttacccatctttttgtaaataactcatcactgtctagtgatgtggtgtagtcgcttgtgtgttgtatatatcacatcactagcctttcctaaaatttaaaaaaataggctattttcatgttatccactattcgagaacaatggttctccaatattcgcggggatgttcttgcgggtattgttgttgctttggctctaattcctgaagcaattgctttctccattattgcaggcgttgatcctaaagtggggctatatgcttcattctgtattgctgttgtgattgcttttgtgggcggtcgtcctggtatgatttctgctgcaactggtgctatggctttattaatggtcacactggttaaagagcatggtctgcaatatttattagcagccacaattttgacaggatttattcaaatcctagcaggctatctaaaattaggagccttgatgcgttttgtatcaaagtcagtcgttattggctttgtaaatgccttggctattctaatttttatggctcaattgcctgaacttaccaacgtcacttggcatgtttatgcgatgacaatcggtggtttagcggttatttatctatttccctatatcccagtgatagggaaacttttaccctctcccctcatctgtattgtcctacttacgctctttgccttattcattggtttagatgtaagaactgtcggtgatatggggcaattgccggatacgcttccaattttcttgcttcctgatattcctttaaatcttgaaactttagctattattttaccctattcactaggtttggcagccgtgggtttacttgagtccatgatgaccgcaacaattgtcgacgatttaacagataccaccagtgataaaaaccgagaatgtaaagggcaaggtgttgccaatgtcgcttcaggcttcttaggcggaatggcaggctgtgccatgattggtcaatccattattaatgtgaaatctggtggacgtacccgtttatcatcatttagtgcaggggtctttctgttaattatggtggtgtttatcagtgactggcttaaagccattccaatggctgcactggttgctgtcatgattatggtatcaattggaacatttaactgggattctctacgcaatatccgccaatatcctctctctagcaatatcgtgatgatcgttacagtcgtcgtagttgttgccacacataacctggcttatggtgtattagtcggtgttcttctttctgcattattttttgccaataaaattgaacgctatatggcgattcaatctgtatttgatgaatcagaaagcacacgtacttatacggtaacaggtcaagtgttcttcagttcagcagataaatttacttctgcatttgatttcaaagaggcactttcaaaagtggtgattgatgtcagtcaggcacacttctgggatgtttctgcggttgctgccgtagataaagtggtcattaagtttagacgtgaaggaacagaagtcgaacttattggaatgaatgaagctagtaaaacattagtcgataagtttggtatccatgataagccagatgctttagatcgcttaaatagccactaagagggattagttatgtcaaaaattattgcatgtattgatggatcattagtaacaaatactgtgtgtgattatgcagcttggtttagcgataaacttaattcacctattaaactattgcatgtcattgataagccaaaagcaaaagcaccacaagatttaagtggtgcaattggtctaggaagtcgagaaaccttgctcaaagaattggttgaactcgaagaacgtaagggaaaaatcgagctagagcatggccagattcttcttcgggaagcaaagaactatttattggagaagttctctattgatgctcaaagttttcaacgccatggcagtgttttagaaacaatcatgggaatggaagacgacattagagttcttgttatgggtaagcatgggaatgaaaccgagcatgattccagtaaaattggaacccatattgaaaatgttgttcgtgcccttcataaacccgtattaataacgtctgcaccatttagtccacctaagtcttttttaattgcttttgatggaagtcagactgcaagaaaatgtgttgaacgcattgcgtcaagtccattacttaaaggtcttgcagtacatttggtttatgtcggaaatccgaatagtgaaatgcaaaatcagctctcttgggcaaaagagcaacttgaatcacaaggttttaatatcacctcgaatacgttggatggtgaagttgataaggcaattatcaattacgctgaacagcatcaaatcgatttgattgtggttggggcttatggtcattcaaagatacgtcaattttttattggcagcaccaccacaaaagtgatcacaagcgctaataaaccagtcctgttactacgataatttcatgaaggggtagaattttgatctatccctttatttttaataagttataaaaggaatcataaatatgaatacgatgttaataagcccaactctaaatgtttcttgttccgaaaatgtgctgttaaaaatatcctcatactttggtgtatctcatgaacaagcttatcgaaaaggcgtagattctcttttaaaattaacagagatggttatagcaaataatgaacattctgaaattattaaactttttttgtgtgattgtcatttaagaacatctatcaatttagatgatatatccgatatgcctactcaattgataggcgattgccttaatgtgattgttctacgttatgcatttgtagtttgacaatcaggtcgtaaactagacattaatgttctaaacttaaacaatatatttgtaaaccaaaaggttgaataaatgggacaagctaaacaaaggggtacacttgagcaaagagtaaagcaagctcaagaacaaaaagatgatttttatggaactgaaagaagtgtagcagaagttctagctgaactaggcttaccaaaagaaagtacagtaaaaggttatgttatccatctacctgaaaaagatgaatttgtagctgcaattaatgacaataatatttctttttcagttgcttatgctcggacacctgaattagcgatgatatatgatgaaccacaaaaagcgatttcagacgctaaaaagatttcaaaacataagctattggtttgtgttttatttgaaacttcaaaccaatacatgattaatgatatttgggctaattattagtctgagtttaaatctattatgtcaaaaattgcatatagttctaaacttatgtttgattgagtttagaactataatgtaaatctattcaattgtttttgttataagttattgattttcatctttatgagtttaaaactttattgtgtaaacacagcatttaaagcttcattaggtgactttttaggtggtggtgataacttaattaacacatggaaatctactctataaaggtctcacatactactatctcagaattttcagcgcgtcttttaatatttcattaatgatcggtgtgacaattactaaaataatctgctgaaatctcaataataatgatcagctaactcgctgatcattattttaagtgcttcaacttattgtgtttttggcaaccaataatattgcccattaagcacaacagtaaaaccatcctcaatctcagtaatcatttccgttttaatctttagagcatctatgtaaggaagttgatgaaaatacctaagcccatttctgacccaacttaagataagttcactgtcatttaaatcagtttgggtaagtgcaataagttccatttctagttttttcttttgtttagtctttaaaaaatcagatttttttaattttaaataatcaatggaagcaccgtaattctcatttaaaaagttaatgaatccagtgagcgccgcagcttgaccagaatattcagcaagatacgctttgacatgctccaaatttggtaattgagcactttctccctccattgacagcatcaacgccacagcaggctttacagccaacctcgctgaacgtattgaagtctcacctcgtttgattttttcttctaatttatttttgtattccagtacaacatcataagccaaagatggttgcaaaatacgttgcacaagcttttccatctgatctcgttctgaacaactttttttgttatccatatctattcgaatgtcatgcacctcttcaagccattgcatcaccaattcaaattttctaagcccactacttcgtaaccttactaataactgctttggagtaggcacagattgattccaatctatttcggttttaataaagaaatgggtatgtttatttatatataatgcagctttatgtgatccaactttcttttctaaccagcctatatagttttcatactgctgttttaagtcactagactcaaatactttctgattttgatcaaatttattccataaattttgatgccaataacaatcatcgcataaatcagcacaacctgctgcaatcatacaatgacatgctttacaggatttctgaggcttatctctacattttttacacgttctttgtcctgatacatcagactccaataagcgatgtttctggcatgatgggcatgtctcataatctcgtgtcgcacattttggacatacccgtagatcatcattaaatcgtgaaattcgggtcaatttttgtgatggcgtaccacatcgttcacaaggctcaatgggtctaaaatacacggaacaactattacacaccacaccatattcggtcagcttacctattggtttatttgtctgattacatcgaatacagggttgtttctttatacattcattgcaaatggcttgttcatcatctctagggagtcgggcaaagtcaccacaacttgggcataatcgctttttaaagatacgggcataacaagtcgaacaatatttcttgcctttatatcgtttttttataaaagaaacagactggttgcatccatgacagtcatgttcaataacattttcagtcaatatgcatcgctccactattattgcttcttcttaataaatttaaccattgacgttgtacagtcgctttagattttggcttagtaacagttattgctgcacgagagacaggataacgtcttgtaggcttaatcattaaatctttcatctgttgaagctgaacaggcaacttcttgcgcttgtcccaaaaatttgcacgacttactccatattcctttgatcgttgtaccaataagtcacatggaatatccataatctgatccaacattgaaagcaaaactattcgttcctgagtactcagatattcaaatgctaatggggtaactggatgtgaaagatgtaaatttacgtcaaaactttcaaataattgaatcacatttttattgggcgtattgaccaaaaatctaatctcactgagccatgaacgagcaatttcaaaccatacttgagtagtcactggggattgattataaaaaccaattttttgttttaagacttgctctgctttattttggaagtttaaagcatttaaattgatgtttttgctttcctcacaacgccttaaatcaaagccacatgtcgtacagatcgctaaacaaccatgttccatatcggctttaaatggttggatcgtcacaccacattcagggcaatggtcaattaaacttaactgatgctcaacacaactacaatgccacccaatacgccacattaagcgcaaataaggcggattttcatgactcttcaggcattcaacacatacttgccgacctgatgtatttgagcggtttcgtgtgcccaaggataaaacccaagggatattttgatttgaatcataatttggctgtatctgagaaacgacgctactcaacatcgattgctgtatcttctgttttgactccatactatgagataacagagcatcgaatctttcggcatctactcctttgtctaaatcaatcgttaaagctctccatttcccccataaagcctcaatgagaaccataggtgagcaacctacatctaaggctgaacggatcaaccaagatgaaaatatttccccttgctgaatgggagttctgatataccaacattgttcaggttgactcatctctacctccctataatgatttcgcaaaattaactcaggctgagatttatatttctaatatttcttaaaccctccgtaggtttaagccatttaaacttatgtacgatgtcataggtaatttcttcatcaccttgtaaaatggcttctttggcacactccaccagtaatcgatttaaatcccctaaatttccacctgacacttcaaaaatcaacgtagcaatctctttggatgcaagattagactgtttttttaacggcaatagtcgaacatagctgactaataatcttaaaaaatcttgattgagttcccatttaggtaaattcaccacatcaaagcgactggcatattgcggatcagtatgcagtatggtgattgcctcacgagtaccaacacctacgatattcagactcaattcattgctgaggttcttgagcgtattcatgacttcgggaagcaatttggctgaacctgtcagacaattatgaatttcatcgataatcaacatttttgtttcatacttacgcatcaagtgtacggcttgatttcgtaatttggcttcaggatcacttgcccgaaatggcacaaagaagtgatttaaaatattaatatagagttctttaacattggcttttgctggagcaagtatcggtaaaactggcttagttacggacaataaatccatgtcagcatcacttacggtttttgtataatactgtctagcaaactcatgaatgatagttgttttgcccatattggagtcaccaacaatcaacaagcattcaggtcttaatttcctagggcgattcaaaatatcggtcaatgtgttcatgatggtaatggctttcttatagccaatccatctatcagtaaataatgtctcaatccgttcactatcgcttaattgcatgatttcaagtacatgctctgcaagatgttcatatttttccattgcatcaccttaaatcgtcaaatgcagttaaaggagtactccacaaatcatcacttgtctgaagactttcagaaactacagcctttttagactgattctgttcggaaagctgagtaatggcttttgcattttccttttttctttggtttgagcgacgttgctttcgagtcaagcttctagcctgattaagttgatcacgtagatgcaaaatcgccttgtaaatctcatcctgattctgaacatcctgacgttcacttttgagatagttctgaacctgcttatattcaaataagctaatcggtggtatctctcgctttgcggtaggtactttaaaataggtattagaatatggctcataaaaccaaatctgtgaaatatccctcggatcacgtttaaacaagaattttcttttgcgctttcgattattgtcctctggatcaatagaattaacccattgtcttaaacagtcggcaaaatagaataagttatctttttgcacccctgtacgctgaatagtcgcttcaaattcaggtagaaaatcaataaacaaggtatcttcatctgatacacgttctttcaaacctgtacctgctgtcgtcttcgtcccccaaacaccttcttcccatttaacgattggggatgttcctaaagcggaatgtttcttctggtgataaactttagtaatccaatacacgatatagtattcaagctcttttaatgtcatacaggcttgtttagcggaatcataagtcccacgctgctgtacatttgaaaaagttgtaccatccaagacatgcatttcaagattgacgataccaagcatacgctcgatatgaccgccaaatcttgccccaccaattggtcggtattcccaatgaatcccatactttagacaagctttactgatgtgattggttctaaaatcggggccattatctgtatgcaccgagtccataatcccttcgacctgccattcagcatcaatatcgagttcgatcaacttacgtttttttgacaaaatacaagatgcgatacacatcgccactgaagtcgtacttggcgcttctagtgataggtaataccctacgatcatccgactgaaaacatcgattgccaaggttaaatgaggttttccaatcgcttctctaaactcgtcatccacgatttcaatatctagaggtgtatgatcaatctgcacatatgccaaagggtaatcagcatttggaaatgaaccagcagcagccttaaatttatctattgcagctttagatccaagacgtgctttcgttacttggtaatcatttaaagcctcgattcttctacgaatagagttttcatgcggtgcttcaagctgaagccgagaacactctgcttttacaatttcaatcgttttggaaatactgggtttcttcgcattcaaatattcatcattgatagcttgtttaatgatattgctcacttgaggtgacaaccttgatttttcagttgtccaacctcgttttttgggaatcaatgccattagagaattattttcccgataatctttaagccatttccacaatgttgagcgattcacatcatattcattcgccctattttcgaccagttcagtcgttgaatactcaatcaaaggcttaataatctcataacgttgtaaagcaatctgccaagcttcattactaatatcctgatcacccttattcaaacgctcagttagcgtatttcccccattaaaaatggtcaaacttctagcattgacctgtagactacgtaccgaatcaagacttgatataacaatgtcattggcatttaaaacattcacaattttatagggttgcccctcataaccgacaaccacattgggttttagaatgatacgactacgatcgatattgacagcattagattcaatcatttagatattcctcgcaaatgcatcattttggttcacccatatcactgtttcagccgttaaagggcaatacaagtcacaagcaatcatgcgctttgccactaatgcccaaacttggtgaattccttttaaaacattggttttatctttaaaaatatgggcaggtaattgattaattgttgattgacctaactcttgtagggtatcgagtaatagttgttgatcaacggcacctacatgagagcgtctaaatttttttaagaaattaatattttcccaatactgatcatataatcttgtttcactgataattttgaacttccatcctttatcagcagcaaaacgatgggctgctctgaattttggttttaacttatcccagtcctcaacaagctttttcttaggcttaatttcgatgagcattggtacaggaaaatcctcaaaatcatcacaattcgagcttgaaaactgcactaaaaagtcaggagtgtaggttgattggttacccaattcagtgatgtaggggataactacaggttgaccgataacatcaatcacattgttattaaattcttgcttaagtatgaaatcacgctcaagggtcgattcaaaccaaatggttttctcacctctaaaggcataatttcccgaaatactcccataaacagtttgagcttttctaacaggtaagtattcgtcactcaattttttcataaaaaagtcaccattcaggcactcgtgcctattaatgtaattttgcaagtcactcttatctatttatgtaaataatctaatttaattgtgtgaaattagagtgacaacctattgattatctataatgccactctattctattgctgtaaatgacacaagtgcttagttatttcgtcaccaaatgatgttattccgcgaaatataatgaccctcttgataacccaagagggcattttttacgataaagaagatttagcacagcgccgcggcagggatccgccgtgctggttgtcggaaaaggagccgctagtgggaaagaggagggtaaattttcagcgttgctggctccccgtcagccggattgggttgcatcgcaggggtgtcgaaagagtcaactgcggtccaaagctgttggacttgggtgaaaagggcgtttattcttcctatacgttgtcggcagcgggccaaaaaggaatacgtccatgcccatcgaggtgaaaccggctgtgagcgcgggttcaagcatatagcccgacaggcgcgtatccttgccgatcacgacacgatggcggtggtcaccgcgacgaaagacacggccagccgccatgccgacgcgcaaggcggtttccgccgtcatcgcgccttcgttggctttgccacgaataccgtctgtgccgaaatatttgcgcaccataaggtcgattatcctgtcgtcgggtcgccctcaaaggggacatgcctgctgaaccgcgaatatagagaaatatcccgaatgtgcagttaacgaattcttgcggtttctttcagcgccgccaataccgccagcccgtcgcgcaaggggcgcggctcgtgtgtgcggatgaagtcagctccacctgcggcggcggcaagctctgcagcgagtgtcgcggccccgacatcccccggaccacggcctgtgagcgcgcgcagaaaggatttgcgcgaaacagacagaagcaccggcaaatcgaagcgcagccgcaattcatcgaaccgcgccagcaccgagagcgaggtttcgggagcagcccccagaaaaaaccccatgccgggatcaaggacaaggcggttgcgtttgataccggcacccgtcagcgccgcgatgcgcgcgtcaaagaacgccgcaatgtgatccatgatgtcgccagcgggtgcctcgcgccgatctgcctgcccgtcttgcaccgaatgcataacgacgagtttggcagatgatttcgccaattgcggatagaacgcagcgtctggaaaaccgcgaatatcattgagataggccacaccacgcgacaaggcataggcttgcgtcgcgggttgataactgtcgagcgagacgggaatgccatctgccttgagcgcgtccagcaccggcgcgatacgcgcgatttctgtgtcggacgaaacaggcgcggcgtcgggattgctggatgccggaccgaggtcgatcacatctgccccctcggccatcagcttacgcgcctgcgcaatggctgcgtctggcgccagataccggcctccatcggagaaactgtccgaggttatgttgacgatgccgaaaatgatgagcgatttattcatgggggcttctataataataatctctgtacacgataaaaatagataactcattgaaataatgtcataataattgttttctaacgacgaatactatgacacatctcaatgagttatatcttatcttaaacaaatatctaaaatggaacaagtcacatttaaagtgctttgcgctcatcatgcttgtgattattttaaagcaaacatgtaatctttcttctgcatctaaagccttgcccatcaagtgcttaccacaatcattttatcgacgtatgcagcgcttctttgcaggtcagtattttgattatcgtcaaatttctcagttgattttcaatatgttttcattcgaccaagtgcaactgactttagatagaaccaattggaaatggggaaaacgaaatattaatatcctgatgctcgcaatcgtttatcgtggaatagcgatacctatcctttggacattgcttaataaacgtggaaattcagatacgaaagagcgtattgctttgattcaacgctttatagccatttttggtaaagaccgtattgtgaatgtgttcgcagacagagagtttatcggtgagcagtggtttacatggttaattgaacaagacatcaacttctgcattcgtgttaaaaaaacttcattgtcaccaatcatttaggaaagaatcataaaattagtgatttatttcgccatcttaaagttggtcaaattgaatgtcgtaaacgacggattttggttggtcgggtgaaactatatataagtgcactacagttagaaaatggagagcttttactcgtcgtttctcctcagtttaatgccaatgctattcaggattatgcattacgctgggaaattgaaaccttattcagttgtctcaaaggacgcgggtttaatcttgaaaatacgcgcttgacagaccctagacgagtgaaaaaattgattgcggtgttagctataagcttctgttggtgttacttaacgggtgaatggcaacatgatcaaaaaaaagcgataaaaataaagaagcatggacgactctcaatgagtttatttcgctatggtttagactatgttcaaatggcgattcagcgtttaattggttttgggaaaaaagaagagtttaaggaaattttggcaattttaagaaggcagaaccctgataggataagggttctgtgaaatttgtcgtgtacagagaataataataatcgagcatgagtctcatacggatgctcgggtcgaaagggaatccccaggcgagtaacctgtttgcggtgatccattagctgcaggagcagaagagcatacatctggaagcaaagccaggaaagcggcctatggagctgtgcggcagcgctcagtaggcaatttttcaaaatattgttaagccttttctgagcatggtatttttcatggtattaccaattagcaggaaaataagccattgaatataaaagataaaaatgtcttgtttacaatagagtgggctttcttatagccaatccaccgatcagtgaataatgtctcaatccgttcactatcgcttaattgcatgatttcaagtacatgctctgcaagatattcatatttttccatcacatcaccttaaatcatcaaatgcagttaaaggagtactccacaaatcatcacttgtctgaaggctttcagaaactacagcctttttagactgattctgttcggatagctgagtaatggctttttcattttccttttttctttggtttgagcgacgttgctttcgagtcaagcttcgagcctgattaagctgctcacgtagatgtaaaatcgccttgtaaatctcatcctgattctgaacatcctgacgcccattcttgagatagttctgtacctgtctatattcaaataagctaatcggtggtatctctcgctttgcagtgggtactttaaaataggtattagaaaatggctcataaaaccaaatctgtgaaatatccctcggatcacgcttaaataagaattttcttttgcgctttcgattattgtcgtctggatcaatagaattaacccattgccttaaacagtctgcaaaatagaataagttatctttctgcacccctgtacgctgaatggtcgcttcaaattcaggtagaaaatcaataaacaaggtatcttcatctgatacacgttctttcaaacctgttcctgctgtcgtcttcgttccccaaacaccttcttcccatttaacaataggtgatgttcctaaagctgaatgcttcttctgatgataaactttagtaatccaataaacgatatagtattcaagttcctttaatgtcatacaggcttgtttagcggaatcataagttcctcgctgctgcacatttgaaaaagttgtaccatccagcacatgcatttcaagattgacaataccaagcatacgttcaatatgaccgccaaatctcgccccaccaattggtctatattcccaatgaatcccatattttaggcaagctttactgatgtgattggttctaaaatcgggtccattatctgtatgcaccgagtccataataccttcgacctgccattcagcatcaatatttagttcgatcaacttacgtttttttgacaaaatacaagatgctatacacatcgccactgaagtcgtacttggtgcttctagtgataggtaatatccaacaatcatccgactgaaaacatcgattgccaaggttaagtgaggttttccaatcgcttctctgaactcgtcatccacgatttcaatatctagaggtgtatgatcaatctgcacatatgccaaagggtaatcagcatttgggaatgaacccgcagcagccttaaatttatctattgcagctttagatccaagacgtgctttcgttacttggtaattatttaaagcctcgattcttctacgaatagagttttcatgtggtgcttcaagctgaagccgtgaacactctgcttttacaatttcaatcgttttggaaatactaggtttcttcgcattcaaatattcatcattgatagcttgtttaatgatattgctcacttgaggtgacaaccttgatttttcagttgtccaacctcgttttttgggaatcaacgtcattagagagttattttcacgataatctctaagccacttccacaatgtagaacgatttacatcatattcattcgctctattttcaaccagttcagtggttgaatactcaatcaaaggcttaataatctcataacgttgtaaagcaatctgccaagcttcattgctgatatccttatcacctttgtttaggttttcagttagcgtattttctccctcaaaaacggtcaaacttttagaattgacctgtaaactacgtaccgaatcaagacttgatataacaatgtcattagcatttaaaacattcacaattttataagggtttccctcataaccaacaaccacattgggtttaagtgtgatacgactacgatcaatactgacagcattagattcaatcatttagatattcctcacaaacgcatcattttggttaacccatatcacagtttcagccgttaaagggcaatacaagtcacaagcaatcattcgctttgccactagtgcccaaacttggtgaatcccttttagaacattggttttatctttaaaaagatgagcaggtaattgattaattgttgattgacctaacttttgtagggtatcgagtaataattgttgatcaacggcatctatatgagagcgtctaaatttttttaagaaattaatattttcccaatactgatcatataatcttgtttcactgataattttgaacttccatcctttatcagcagcaaaacgatgagctgctctaaattttggttttaacttatcccagtcctcagcaagctttttcttgggcttaatttcaataagcataggtacagggaaatcctcaaaatcatcacaattcgagcttgaaaactgcaccaaaaagtcaggggtgtagtttgattgattacccaattcagtgatgtaggggataactacaggttgaccgataacatcaatcacattgttattaaattcttgcttaagtatgaaatcacgctcaagggtcgattcaaaccatatggttttttcacctctaaaagcataatttcctgaaatactcccataaacagtttgagcttttctaacaggtaagtattcgtcactcaattttttcataaaaaattcaccattcaggcactcgtgcttattaatgtaattttgtaagccactcttatctatttgtataaataatctgatttaattgtgtgaaattagagtgacaacctattgattatctataatgccactctattctattgctgtaaatgacaattctgattcggaggtgcctgagtcaaaacaagcagtaatgaaaagacttgtggagataagaatacataactttgaatatttcatagtttagtcctagatatgacaattaaattagagcatgttcttttatttagaatcatgcatttattaaaaaattatttgcactcattaagagattttaagaaaagattaattacttcatctatagtgttaaatttatgctccgatttgaatttttctattaccacaattgtttttagtaaaagattaattgcttcatcatttgagctcaatttatgctctgatttaaatttttctattacctctaaactttcttttgataaccaaagatccttacgcgtgaaccctttttttaacatttcttggcgttgttttgctttacgctctgctgctgtgcttgccataatctacctgaaataatgttaataactttggccaaaaggatgtggagtagcgatcagaacaattcagctaatgaacgtgcgtgattttcatgtgacattctattagttgcaattagatcatcaacttctttttccgaatttgcgtaatactcgcgataagacaccactttgcctttgcagtattccttcacctcagactcggttttatacaatgttacatgcggtgtcataccataacgttcaaattggtcaatactgtcccaaaaaccacacacataaaaagcgaaagcgggagtgtcatcacctacatgaattcttttattcgtggttactatagaatttacatctgccttaacaacttttacgccgttagcttgaacaatataactattactaactgaatttttcattaatctaagtctcctaatgatattaagtttttatttattccggaattaaaatgccacttcttcccagtagatctctaactggcgaactgtcttaacatttccaaagtcacaaccttcatgtccgataatgacacgaggctcaacttcctcatcatagatttcaattatgcttcccaaaaaaatacctttcggaagtatgatgttatgtctctgaagcaatgtggccaatgttgaaacaggcgtcaaataattcaaaattgattttttagttttaatagttgtttgaaaaagtacctcatgctcaatttcttcaaacaattcaacgttctcaacagttaatttatatgctttaacttcattcatttttaacctcagctcataggcattattgtacatattgttattataaattttatattgtgaccgctcacaaagcaagaactatttttaatcaatgttaagtatctagtctgctttaagttgtttcaaactaagaaatctactccatttaacataattatgaaactttatccttatctagttcttacttattgtgaaaatttaactttttagttctcaccttcagtattttttacggctcttggatgtgtatccatataaacatttgtcattgaagtatggtccagatctgtatagatctgagtagtattcaaattactatggcccagcatttcctgaatttcacgaatacctacagaattatttattagatgagttgcaaatgaatggcgtaacatgtgtgggttggattgaattggataaccagcaagtttaaaagcatttttaattcttttatttatttggactcttgatagttgagctccagttgtggtgacaaaaacataattatgtttttgattggtatctttattcataatttcttctcttaaaggcaaccattctagatacgcttcaatagcttttgaacccaaaggtataatacgagttttatttccttttcctgtaactcttacttgtttgcgttttacctctacattttctatttgtaatgagtgtatttcttcaagtcttaaaccacatgagtatgctatttcaattagtgctaagtctcttttaaaaataactgtgcttgatggtcgttcaaattctaaattcttatttgaatctaatacttcatttattactgtgacttcatgaaatttaggtaaaactttactactttttttaattttaatatcttctgctggattgaaattaattaatttttctttagttaaataatggaaaaatgttcttatagcagagatatttttttttagtgtagaaactcctactccattttgagctctataagctataaatgttctaatatctgatgcttcgatttcctctaatgctaaattggtatattcaaagaatagatttaaactatttttaagcgtgtatattgtttcattagatttatttgctaataaatattcatctaaccatttttttagaagtatttctctgtctagcattaataaatcctattaacaaactgtaatgatattatatacgtttaaacaaaataagtggtaaaatatagctatcgcaagacctgtccttatggtggtgcttatgaatagcaaattttctgttgatcaatcgaacaagatttctcttaaagcagtgcttgaagatcttggtgatcaaatgtttgaagcaaataaatgtcctgatactcatcctgtctatgatcagttgcgtgagcgtttacgtaaagatcgtcaacttctagatgccttagatgctcaagatgagaacgcaaatactgaagaacgttctaggagtttggatataaattaaatgacacaaaaaaatgaactagacaccaagtatgcagtgatagttgctggtggtaatggagctggtaaatccactctgatagacaatgtgataattccaaaatttaatagtttaaatcttgatataaattttattaatgctgatgtttggcaattacaacactttggtcattttgataataccaatcctacccatgcacgcgaagctcagaaatgggctgaagctgaacgtcaaaaacatttagatgaaggacgttcttttattgctgaaacagttttttcgcatccttctaaagttgatctcatcaaggaagctaagagtaagggattttacgtagtcctgtatcacatccatttagaaaactcagatatcgcacttgatcgtattaaagatcgagttcgtaaaggtggtcatgatgttgatgaggataaggtaaaagctagatatgagcgtgtactacccttagttgctgaagctactcaatatgcagatttgacttttgtacttgataacagcgtgagagataggcctcatcagcaagtatttaaattagagtacgggaaaattactgcgattgacaacaatgttccggattgggccattaaagcttatgagaagcagctcactgattatcttggattggatcaagcaaccaaaatttcaaatactaatgaagatttaactatgtcaaatactaaagagaaacttggattcgagtataacgctagactgctggctaatgatattcaacctcaacatcgagaaacagttgttgctaattatcgaaagaattttgttgaacatgtagcgaactctgctgcggtagctggtaattcacataagcttgatgatgtagcatctttaataaatggcaccactgtaggtggacacagtgttaaggaccagcgacaagtattaaatttaattgatgcgtcaaatgaactggtaaatatggttcgtaatggaaattttgcattaaataaatctacatatttaaaagtcaatggaattgttgcagatcgtgaatcgattgaagctggtgttctacgtggcgaaggagttgaacaatcatttactccggatgtaggaattagacactttagaacccatcgaccgatgaaaactgaagaagatgctccggcgttaaataaattcatgcaagaagggtttgatcatatcaactcactcaagaacccactagaaaaaggtattgctacattcctttatggaagcctcaaccaattcacatttgaaggtgagaaaagaacagctcaccttatgatgaatggagtattgatgagtgctggtttagatgctattagcataccggctgataaggcaattgacttccgtcaaaaaatggttcgtttctatgaatcaaaaaatgcggatgaagtgatggagtttttagctgacttgcatccggctctcaataatacgaaaaaattagatgcagaaaaggaaaagaaatcagaaaatgactttggccgcagctttcagtaattttcgtttatccttttaatatcaatacgagagacactataattatagtgtctcttttttaatttaaagtattttgtattatttatggccagccttaattctgagttccagatccctttaaaagtggttacaacgcgcttaaatcacatgaaaattaatttgccgcaattggtaaagaaaattgaaaagagagcgattgaaaacttaaaaagacgtaaagataagaaagaacaaattgatctactgataacttgggatgattggatttatgccgcgcttgatgctgatcatgaacgtatacatggaagcgcggatcctcacccacttccaccaacattcaaaaataatatggttagtggtgtatatgaaaaagctttaaaaaatgtcatggggcatttcggagttaaagctactgttccagcatgggcggcaaatataaaggttggtgagcatattccaaaggaattgcttgatcgtctgcctgtgaccactggagagcttgtaactctaggaaattggatgctcacaaaaaatatataccggttcgaagacatagtaattaatgagttaattaagaccggctttaatggggttataccaaaccatattttgaaccttcccgatttgtgtgtatacattcagactgataatgctaagggtcttacattcgaaaatagacaagttgtgggtgttctattctgtgtaactgagctttgtggcgaccgccttttagtttcaacaatgtaccttgatgatggtatgccacgcacaattgcaattatgttgaatgaggaccaagatattgaagcaagcctcacaaattttgtggaccaatttcaacaagactatgatccagaaacaatggcttcagatctgaaagaaagacttaaaatacagaaaaaattaatcaatcttgttttatggtttagtcaatcaaaacctgaagtgactcctttaactccagataccaataagccggtacaatttgttgagattaagaaggaaaagcgtttatttgaagctggcaaatataagacttttaaaattggatctgaaacagctaggaaattaactaaattatacgaagaaattgaagtggccaaagctgaaggaaaagcatctggtagagagccacatttaagaaaatcacattggcacctttactggtatggtaagaaaggtcgttatgaacgttatgattttttattaattcctgtcacaattgttggcggcgtttcaaaagattaaactttataagtagagaaaaaatggataattcagaatctaaaattttagctgaatacgagaaagcgaagaagtgggataaatacgaaaaagtattttctattcttggagtactttctttgtttatatttatggttatgatcataatttcagcaattactttgagtttaaatgatacttcaccaactaaaatatttaattcttattgttgggctgcaatattatttttggcagttttattcacctcactaagaaatattgctgagcagatttcttttaagaaatctatggaaatcttaatagactcaaaagatgctgaagatgaaaaagatcaattggcagtagtaagaaggcagcatacaattatttgcataactgcattttgtgcattaatagttgcggattttattttattctactttattgcttttaatctcacccttcccctaaatatactgattcataaacccttatttattattatgctggcttgtttaatattttttactattaattatttgatttataaatataagtttaataaattaaacaacgaagcaatggttgcattcggtaagcaccttgataataaaagaaagaaataatataagaaaaggctcattatgatgagccttttttctaatctttagttttattaacgatgccattgcagcatttacatgtatagatatattcagtaggatccaaaagaattttaataaaaatactatttaaaaagttatagattatgaacctaacaattccgagacacgccaaaaagctagaactattgtcagttccacaaataaatcagagtttacacaaataaactagagcaagaataaaaagtatattatctatatgctttaatttttcattttgtaaaaatatatgcctgttaataatgacaaaataacgactattgattgcttcccaaacgataatattagtcgagtggtttatagatatggtggacttgttagaaacgaagataacgattcaactaatccttttgttgaagtgttattaattgagattagaaaaagtgatcaatggttatttttagataagtgctcaacattccttgttcccgtacttgatcttgatgctgttcaacatggcagtatttgggatggaaatgttttaaccgatcaatcctatcggttttcaggaaaactcattacaaaacgattttctttcgacttcaccaataataaacctaagaatataaaacttacggacagaatccccaatacttctgactactacattcctttaaaaaactatttcctcccaaataaagttgattatgttcttcaaggctatccatttaccaaatataccaatgattcatatcgcaaagtgaatcattgcctaatgcattccaatgatggaactcaagtcatcacatcatcaattcatgtattgcatagcttattcgtcaatcggaaggatattaggggacttttattaggaacttcgagtcaatccatcattaatcgttttttagaatcttatacaacagaaattgtggacgataatgttgaatataaaattaaaatcagaaagccatatgaagatataggcgagactgcaattatttttcttgctaatcttgccttaaacccatatgtgcaaacgatagttgataaaattcaacgaagtatggaaattaccgagtttaatcatcttcagcagggtacaggcaaaaggtatcccattgtgtttccaccacatcccacaaagcttttccttgaagcagaaggaatttggctagatgacaataagactcgtttttttatcactagagtgaaaaaatttgatcctattaacgatcacatgattgatgtcaacaaagacctgaccaatacaatttcaaagcctgatgagaaaaatcctagacctcgtgaaaaaagtcaaaataagaatgagcacatcaatactcaaaaaccaccatcaagaacaagcggtgaatatcgtaagcgttctgaggtggaaactggaaatacacaaggtattctgaagtattcttttaatgaaccaaccgatgatccaattgaagtcggagcatctaatcaaccttattcagataaatcagaagaggttgaaacatcttctgatgaaccctatggtaatcaaaatactaagatcaaaaaatctgaaacgacagatacaccacctagcagagatgaacgttttgacattcaatacattatccaatctctccaagaacttgcttctgaaatgggttctcctctggaacatctgtctgcaattaatgaacatggtgaaatgatagcgagtattaatttgcttcaaatcaaaaaacttgtgcctgaacccaagcatccctcatggattgattatgataaagggcgaaaattattgttcttaaaattagacttaaaagatcaaaatggattttcctatctcatcgatatacataaaaataaaaatcatgaagcattttgtgcctttcttatttttactcagaataagttaacaagcgaacaaattaaaaaaatctgtattgaactagaaaatgccaagggaataaaaaaatgggcactctactgtgatagtttcattcataaaatgattgcaataaaacatttatacgcaacaccagatgaatggaaaaatcgctttaaaaatttattcataagcttacagaaggacaaatcctaattaaagaatattttttatacaatcatatgttcatgaaattacttggtatttcatgttttctataaatttgcgaaataaaaaagagtgaaattttcgttcagttcgcctatactaacagttcaatttaaatttctattcgtattcacacacttatgcttttgactccaccctagtttatttacccatctttttgtaaataactcatcactgtctagtgatgtggtgtagtcgcttgtgtgttgtatatatcacatcactagcctttcctaaaatttaaaaaaataggctattttcatgttatccactattcgagaacaatggttctccaatattcgcggggatgttcttgcgggtattgttgttgctttggctctaattcctgaagcaattgctttctccattattgcaggcgttgatcctaaagtggggctatatgcttcattctgtattgctgttgtgattgcttttgtgggcggtcgtcctggtatgatttctgctgcaactggtgctatggctttattaatggtcacactggttaaagagcatggtctgcaatatttattagcagccacaattttgacaggatttattcaaatcctagcaggctatctaaaattaggagccttgatgcgttttgtatcaaagtcagtcgttattggctttgtaaatgccttggctattctaatttttatggctcaattgcctgaacttaccaacgtcacttggcatgtttatgcgatgacaatcggtggtttagcggttatttatctatttccctatatcccagtgatagggaaacttttaccctctcccctcatctgtattgtcctacttacgctctttgccttattcattggtttagatgtaagaactgtcggtgatatggggcaattgccggatacgcttccaattttcttgcttcctgatattcctttaaatcttgaaactttagctattattttaccctattcactaggtttggcagccgtgggtttacttgagtccatgatgaccgcaacaattgtcgacgatttaacagataccaccagtgataaaaaccgagaatgtaaagggcaaggtgttgccaatgtcgcttcaggcttcttaggcggaatggcaggctgtgccatgattggtcaatccattattaatgtgaaatctggtggacgtacccgtttatcatcatttagtgcaggggtctttctgttaattatggtggtgtttatcagtgactggcttaaagccattccaatggctgcactggttgctgtcatgattatggtatcaattggaacatttaactgggattctctacgcaatatccgccaatatcctctctctagcaatatcgtgatgatcgttacagtcgtcgtagttgttgccacacataacctggcttatggtgtattagtcggtgttcttctttctgcattattttttgccaataaaattgaacgctatatggcgattcaatctgtatttgatgaatcagaaagcacacgtacttatacggtaacaggtcaagtgttcttcagttcagcagataaatttacttctgcatttgatttcaaagaggcactttcaaaagtggtgattgatgtcagtcaggcacacttctgggatgtttctgcggttgctgccgtagataaagtggtcattaagtttagacgtgaaggaacagaagtcgaacttattggaatgaatgaagctagtaaaacattagtcgataagtttggtatccatgataagccagatgctttagatcgcttaaatagccactaagagggattagttatgtcaaaaattattgcatgtattgatggatcattagtaacaaatactgtgtgtgattatgcagcttggtttagcgataaacttaattcacctattaaactattgcatgtcattgataagccaaaagcaaaagcaccacaagatttaagtggtgcaattggtctaggaagtcgagaaaccttgctcaaagaattggttgaactcgaagaacgtaagggaaaaatcgagctagagcatggccagattcttcttcgggaagcaaagaactatttattggagaagttctctattgatgctcaaagttttcaacgccatggcagtgttttagaaacaatcatgggaatggaagacgacattagagttcttgttatgggtaagcatgggaatgaaaccgagcatgattccagtaaaattggaacccatattgaaaatgttgttcgtgcccttcataaacccgtattaataacgtctgcaccatttagtccacctaagtcttttttaattgcttttgatggaagtcagactgcaagaaaatgtgttgaacgcattgcgtcaagtccattacttaaaggtcttgcagtacatttggtttatgtcggaaatccgaatagtgaaatgcaaaatcagctctcttgggcaaaagagcaacttgaatcacaaggttttaatatcacctcgaatacgttggatggtgaagttgataaggcaattatcaattacgctgaacagcatcaaatcgatttgattgtggttggggcttatggtcattcaaagatacgtcaattttttattggcagcaccaccacaaaagtgatcacaagcgctaataaaccagtcctgttactacgataatttcatgaaggggtagaattttgatctatccctttatttttaataagttataaaaggaatcataaatatgaatacgatgttaataagcccaactctaaatgtttcttgttccgaaaatgtgctgttaaaaatatcctcatactttggtgtatctcatgaacaagcttatcgaaaaggcgtagattctcttttaaaattaacagagatggttatagcaaataatgaacattctgaaattattaaactttttttgtgtgattgtcatttaagaacatctatcaatttagatgatatatccgatatgcctactcaattgataggcgattgccttaatgtgattgttctacgttatgcatttgtagtttgacaatcaggtcgtaaactagacattaatgttctaaacttaaacaatatatttgtaaaccaaaaggttgaataaatgggacaagctaaacaaaggggtacacttgagcaaagagtaaagcaagctcaagaacaaaaagatgatttttatggaactgaaagaagtgtagcagaagttctagctgaactaggcttaccaaaagaaagtacagtaaaaggttatgttatccatctacctgaaaaagatgaatttgtagctgcaattaatgacaataatatttctttttcagttgcttatgctcggacacctgaattagcgatgatatatgatgaaccacaaaaagcgatttcagacgctaaaaagatttcaaaacataagctattggtttgtgttttatttgaaacttcaaaccaatacatgattaatgatatttgggctaattattagtctgagtttaaatctattatgtcaaaaattgcatatagttctaaacttatgtttgattgagtttagaactataatgtaaatctattcaattgtttttgttataagttattgattttcatctttatgagtttaaaactttattgtgtaaacacagcatttaaagcttcattaggtgactttttaggtggtggtgataacttaattaacacatggaaatctactctataaaggtctcacatactactatctcagaattttcagcgcgtcttttaatatttcattaatgatcggtgtgacaattactaaaataatctgctgaaatctcaataataatgatcagctaactcgctgatcattattttaagtgcttcaacttattgtgtttttggcaaccaataatattgcccattaagcacaacagtaaaaccatcctcaatctcagtaatcatttccgttttaatctttagagcatctatgtaaggaagttgatgaaaatacctaagcccatttctgggaagcaatttggctgaacctgtcagacaattatgaatttcatcgataatcaacatttttgtttcatacttacgcatcaagtgtacggcttgatttcgtaatttggcttcaggatcacttgcccgaaatggcacaaagaagtgatttaaaatattaatatagagttctttaacattggcttttgctggagcaagtatcggtaaaactggcttagttacggacaataaatccatgtcagcatcacttacggtttttgtataatactgtctagcaaactcatgaatgatagttgttttgcccatattggagtcaccaacaatcaacaagcattcaggtcttaatttcctagggcgattcaaaatatcggtcaatgtgttcatgatggtaatggctttcttatagccaatccatctatcagtaaataatgtctcaatccgttcactatcgcttaattgcatgatttcaagtacatgctctgcaagatgttcatatttttccattgcatcaccttaaatcgtcaaatgcagttaaaggagtactccacaaatcatcacttgtctgaagactttcagaaactacagcctttttagactgattctgttcggaaagctgagtaatggcttttgcattttccttttttctttggtttgagcgacgttgctttcgagtcaagcttctagcctgattaagttgatcacgtagatgcaaaatcgccttgtaaatctcatcctgattctgaacatcctgacgttcacttttgagatagttctgaacctgcttatattcaaataagctaatcggtggtatctctcgctttgcggtaggtactttaaaataggtattagaatatggctcataaaaccaaatctgtgaaatatccctcggatcacgtttaaacaagaattttcttttgcgctttcgattattgtcctctggatcaatagaattaacccattgtcttaaacagtcggcaaaatagaataagttatctttttgcacccctgtacgctgaatagtcgcttcaaattcaggtagaaaatcaataaacaaggtatcttcatctgatacacgttctttcaaacctgtacctgctgtcgtcttcgtcccccaaacaccttcttcccatttaacgattggggatgttcctaaagcggaatgtttcttctggtgataaactttagtaatccaatacacgatatagtattcaagctcttttaatgtcatacaggcttgtttagcggaatcataagtcccacgctgctgtacatttgaaaaagttgtaccatccaagacatgcatttcaagattgacgataccaagcatacgctcgatatgaccgccaaatcttgccccaccaattggtcggtattcccaatgaatcccatactttagacaagctttactgatgtgattggttctaaaatcggggccattatctgtatgcaccgagtccataatcccttcgacctgccattcagcatcaatatcgagttcgatcaacttacgtttttttgacaaaatacaagatgcgatacacatcgccactgaagtcgtacttggcgcttctagtgataggtaataccctacgatcatccgactgaaaacatcgattgccaaggttaaatgaggttttccaatcgcttctctaaactcgtcatccacgatttcaatatctagaggtgtatgatcaatctgcacatatgccaaagggtaatcagcatttggaaatgaaccagcagcagccttaaatttatctattgcagctttagatccaagacgtgctttcgttacttggtaatcatttaaagcctcgattcttctacgaatagagttttcatgcggtgcttcaagctgaagccgagaacactctgcttttacaatttcaatcgttttggaaatactgggtttcttcgcattcaaatattcatcattgatagcttgtttaatgatattgctcacttgaggtgacaaccttgatttttcagttgtccaacctcgttttttgggaatcaatgccattagagaattattttcccgataatctttaagccatttccacaatgttgagcgattcacatcatattcattcgccctattttcgaccagttcagtcgttgaatactcaatcaaaggcttaataatctcataacgttgtaaagcaatctgccaagcttcattactaatatcctgatcacccttattcaaacgctcagttagcgtatttcccccattaaaaatggtcaaacttctagcattgacctgtagactacgtaccgaatcaagacttgatataacaatgtcattggcatttaaaacattcacaattttatagggttgcccctcataaccgacaaccacattgggttttagaatgatacgactacgatcgatattgacagcattagattcaatcatttagatattcctcgcaaatgcatcattttggttcacccatatcactgtttcagccgttaaagggcaatacaagtcacaagcaatcatgcgctttgccactaatgcccaaacttggtgaattccttttaaaacattggttttatctttaaaaatatgggcaggtaattgattaattgttgattgacctaactcttgtagggtatcgagtaatagttgttgatcaacggcacctacatgagagcgtctaaatttttttaagaaattaatattttcccaatactgatcatataatcttgtttcactgataattttgaacttccatcctttatcagcagcaaaacgatgggctgctctgaattttggttttaacttatcccagtcctcaacaagctttttcttaggcttaatttcgatgagcattggtacaggaaaatcctcaaaatcatcacaattcgagcttgaaaactgcactaaaaagtcaggagtgtaggttgattggttacccaattcagtgatgtaggggataactacaggttgaccgataacatcaatcacattgttattaaattcttgcttaagtatgaaatcacgctcaagggtcgattcaaaccaaatggttttctcacctctaaaggcataatttcccgaaatactcccataaactttttaacaggtaagtattaatcactcaattttttcataaaaaagtcaccattcaggcactcgtgcctattaatgtaattttgcaagtcactcttatctatttatgtaaataatctaaattaattgtgtgaaattagagtgacaacctattgattatttataatgccactttattctaaactgtaaatggcagcggttcacaccctaaaccgggtgaaattactttatctcatttaggtgttctatttttagatgaacttcccgagtttgacagaaaggttctagaagtcttacgccaaccgcttgagtcaaaagaaatcattatttcacgtgcggctcggcaaattacttatccggcgaactttcagctcattgcagcaatgaatccttgtccatgtgggtatgcatttaatcaagatagccgttgtcagtgttcaccagaaagcattaaacgctatcaaaaccgcatatcgggaccgttactcgaccgcatcgatttacatattgatgtaccgccattaaaagctcaagaactgcaagacccaacacctgcagaagattctaccactgtacgacaacgtgtgatttatgcttatgaacaacaaatgcaaagacaggattgtttgaatcaggcgctctcacccaaacaactggaacaacatgctgttctcgatagtacttcacagcgaatgattgaaatggctcagcaacgtttaaatttatctgctcgtgcttatcatcgtgttttacgggttgctcgtactattgccgatttggcccaaagtgaggtcattcaaagtcctcatcttacagaagcactctcttatcgaggtaatcactcttaaaataaaacagcggattataagtccgctgttcttttattaagagcttcatttaaggtctcaattagagaggtgatttctttctctgataaagctgcaaaaccaaagcggatactacaattaggatattctttctgtttaaacttctgctctgtatcaatgttgagttcttttagctttatgagctgattttgagtaaatgatttctgaaattttacccacaaagccattccacccgcgggcggttgtatctgaatactctcagcaaaaactctttgaaactcagctaacgcatggtctcgacgtaactgataaatctttttcattttacggatgtgtcgcttgatttcccctcgttgcattaaatcggctaaagcgagttccgtaatattattgccctgccgatcaatcaataaaatatcttcagtaatggtttgaatgatagttggagctgccacgatgtaacctaaccgaataccgggtgcaaaaactttagacaatgaacctacatgaataaccaactcagaatgaggcaaacttgctaagggtggcataggccggctgtcatagtgaaattcgtggtcatagtcatcttcaataatgtaaaacccccatttttttgaaagttctaagagttgaagacggcggctcattgtcatggtaacggttgtagggtactgatgatgtggggttgtataaattgctgcaaccgagtgttcttttaaaatccgttcgagatcttcaataacaataccttgttcatctaatttgacagaaaccacttgaaagccatttgactggaatgctttaaaagcagatgggtaatataattcctcaacgacgatgacaccctgccgattgggtaatgcacgagaggcaagaaaaattcccatctggcttccacgtacaacacagatctcatcttcggcaacattcatgaaacgttccatcgacaacatttgttttaaagcctgccttagttcagccataccacgtgggtcaccatatcccatgtactggttttgagtaattttaatgagtgcgtgccgataggccctcgaaaacaattcataaggaataagcctcggatctggcacaccatcgttatggggccgctgagcaacttgttgaattattggtttatcactaacttttcgatcagctcttggctctatttgaggctttttttccggtaaaacatctgccacaaatgtgccttttcgaggccgagtcacaagccaaccttgagcctccaattcttcataaactgcttgtaccgtttttcgattaattcctaattcttttgacaggatgcgagaccccggcagcatagtgccctgtactaaacggccactcaaaatttcctgactaatcaagttggtcagttttagaaaaaccgttttttcttctctttcatcaatgcggaaatgtatttgccaaggtcttagcatattcgccccatctggaccatataacttataaaaactggatgtattgatccatccagttgttttttattctgccttcacctacttaatttggtcaactggactggagaagagatgaagactgcttctgtaaacaaacacgacttgatgcaacacgcacagcaagacatgcaaaagtggattagcgacttagatttaacagaccgtcaaaagcttgcactgacttgccgtattttatttgatcatgggcatgacgctggtttagcgggtcaaattacatgccgtagtgaaaataaagaaacctttattactcaacgtttcggtttaggttttgatgaaattactgcttcaaacttgcttgaggtgaatcaggacttagaacccatcaatcaagaaggcatggcaaacccagccaaccgtttccacacatggatttataaagaacacccagaggtgaactgtattatccatacgcatcctacctatgtagcggccctgtcgatgctacagattccacttatgatttcccaaatggacgtctgcgcactttacgaagattgctcatttgtaggccattggccgggtgttcctgtaggcaacgaagaaggtattttgatttcttctgctctgggtaaaaaccgcgctgttttgttgtctcaccacggtcaactggtcacaggaaaaactatcgaagaagcctgtaacttggctcttttaattgaacgcgcagctcaactgcaacttttagccatgtctgccggacaaatccagcctatcccccacgctttggcagcagaagcccatgattgggtgtctactgataaacgcaacaaagtgaactttgcttactacgcacgtaaagctttgaaaaaacattctgactgtatttaaaaagagacctcgaccatgaaattaaacggcattattggctaccctgttactcccttttctgatgacaataacatcaatcttcctgttctaaaacaaatgctggatttgcttattgaaaatggctgcgacgcgattgcacctttaggcagtacaggtgaaagcgcttatcttgaatgggatgaatggtgcttagtcgcgaaaacttcaattgaaagcattaataagcgcgtgcctgtcattattggaatttcagaactcacgactaatcaagccatcaaaaaagctcaaatcgcgcaaagctatggtgcagatgcacttatggtgattcctgtatcttattggaagctaacagaccaagagatttttgaatattatcaagcaattgcccaagcaacgactttaccaattatgatttataacaaccccgcgaccagtggtgttgatatgtctcctgaattaatcgtgcgcatgtttaataacattgcaaatattatgatggtaaaagaaagcagcggcgatattcagcgcatgcataaaatttatgagctatcaaaaggtgaacttccgttttataacggctgtaaccctctagctttagaagctttatgcgcaggggcaagcggttggtgtacagcagcacccaatctgttaggtcaacgacctcaacagctcattgaatatgtaaaaaatggtgaattggaacaggcccagaagtcattttatcagcaacttcctctactacgctttattgtaaagggtggtctgcctaaaacgattaaagctggtttacaactaaaaggtgtcgctgcgggtacaccacgcaagccgttgaccaaagccacggatattgagcttaaccagttaaaacaactactttctgaaatagaaaactaataaaaaagcgggtttattgacccgcttttttaaaaccccaacttagaatgttttagttaaactaaacactaaacctgtgtcataaggttttttctgagcatcagtcatgccagaagtactaatatctgtaccgacaacatctagctcagcaacaatacccaagatgttatagtttacgccgactttataatcaatatagctatcatcttcaccaggtccacctgcaactacaagtaaagaatctttatttttaagcttgttataaccaactgaagcaagtccagtaaatccggtgtctgcaattggtgccgaataacccacgttaaaataccagaactcgtcagagtggccccagtaatcgttagaataattcacgcccacactgagtgcatcacctttaaataaagaatctgcaaacgttaattttccataaaactcggtaaagtcaaaaccagtgtccccattgtatggattagtgaattttgagtcagagccaatgtaaccataacggatcacaccaacatcataagtcggtgcaagtgtatctgacagttttaaggtgttggtataacctaacgagatatcagtttcagttgaaacaccaggtgtattaaagtctacgcttgacccccaaagcgcaacataagcacctgacttatgagagaaagtgaagccaccttgaatagctggattatttgaagactgcgtaataccacggaagcgataatctgtggttgctgccacactaccagttgcggtgatgccgtaaaaagatggagcatcttcagccataaccatggttgaacctgccgtgagtacgccgaatgttactgctttaagtgcaaacttcatcattttgatctcccccacaatgaacgcacgatttatatgacttaaacaaattttgttacttaagctttagcaattgctgtgccaagttcatatttggtatcgctacacttcattaatttagagactaaaaaacttatataacgcgaaaaataaaaatcttccaaataattatctttatatataacaataaagtatgaacattttgtttgcgtaaaatataaagaaaacatgagaaaacaccttatcggaaataaacaagccgagatcggtagtattgaatggtagggcgtaaagtctctatttcatttctatataaagagataaaaactccataaatttattagtacagagcctctttatttaacccttatttttatttatgaaccattttgggctttttccgcacaaaaatataaatgaaaaacaaattgcacaaatttcatgcaaattatcgcactaaatttgatcgatagagtctaggatttttctgacatcgctttcgtctctgttttaaacaattttttgatataaaaatgttataaagtaacaatatagagtgagattactaaaaattgctcaagaaaattgcttaagaagagattaaaaagtaaacatatcaaacaaaaaagagtaaaaattgaacacaaaaatcaagtatttttaaaattttcacataagaaaaaatggtaaaattcaactaaaaaataaattactttttttattttaaacaataaattaactataaaaatctaaaaataaatctagttaaacttccctaccacattaatcaaatcctgcatagcatatataaaataaaatgaacaaaaatatatcttttttatagattacttatacaattgatggaaatcctaggccctgaacaataacaaggcacaggatttatcgtttttatgaggttctttaaatatgctaaaagcacaaaaacttacattagcagttctcatttctgcggcaataatttcctcagctcaggcaagcgagcaaagtgaggcaaaaggatttgttgaagatgcgaacggttctattctcttccgtacaggttacatcagccgtgacaaaaaacagggcgcgaaagataccagctcagttgctcaatcagcaattgtaagtatcgaatctggctttacccctggtatcgttggtttcggtgtaggcgttgttggtgatggatcatttaaaattggcgaaaacaaaaacgctggaaaccaaatgattccaaaacacaacgatggttcagcttacgaccactgggctcgtggtggtggcagcgttaaggcacgtttctcgaatacaacagtacgttacggtactcaagtactcgacttaccagtccttgcaagtaatacaggacgtatggttcctgaatacttcacaggtactttattaactagccatgaaatcaagaaccttgaggttgttgctggtaaatttactaaagaccaaatgtctgaccaaatcaataccgatgcggatgcttctggcagaggtcttgaccgtgcaattgtttggggtgctaaatataagtttaatgataacttaaatgcatcttattatggcttagacagcaaaaatgctcttgaacgccattatgctaatgttaactttaaacaacctttagcaaatgacagttcattaacttatgattttagtggataccatactaagtttgatgcaaatgcacacacttattcagcaactggaactgtagcaccaaattatgctgcggatggtatagctggcgaagaaaagaccaataatatttgggctatttcaggtacttatgcgactggtccacatagtgtgatgttagcatatcaacaaaacactggtaatgttggttacgactatggccaaaatgctgatggtttccaaagtatttatttgccaaactcttatatgtctgatttcatcggtaaccacgagaaatctgctcaaattcaatacaatgttgattttggcaagttaggtgtattacctggtttaaactggaccactgcatttgtatatggttgggacatcaaggttagaaatgtaactgatgatgctcaagaacgcgaattctttaaccaagtgaaatacacagttcaaagtggttttgctaaagatgcaagccttcgtattcgtaactcttactaccgtgcaagtgatgcttaccaaggcgcttacatcggtgataccaatgaatggcgtattttcttagatattcctgtgaaattattctaattcacagatttatcaagcataaaaaaaactacctctggtcacacaggtaggttttttattaagcccagaatatcaattgcgacgctctaggcttaaaaattagagcttattttttagcagcttcgattgctttcaatacttccgctttagcaacgtcagcaccttcccaaccgctgattttcacccatttgcctggttctaaatctttatagtggctgaagaaatgctcaacttggctaatcaacaatggaggaagatctgtatattcctgaacatctttgtaaagcggagataatttttcgtgtggaacagcgattaatttcgcgtcgataccaccgtcgtcttccatgtttaatttgcccactgggcggcaacgaattacagaaccggcagcaacaggatgtggagttacaacaagtacgtctaatgggtcaccatcttcagacaaagtatttggtacataaccgtagtttgctggatagaacattgctgtacccatgaaacggtctacaaacaatgcatcagagtctttgtcaatttcatatttaattggcgctgcatttgcaggaatttcaatgatgacatagatgtcatttggtgcatctttacctgctgggatattgctgtaactcatatcaatactctttcgttatgaagtcagatgtaaaatccactcgattataacgtggatatcatcaaaatgatgccgattatacaatgcgcacacgcgaaagttgatatgaatggtgacagaatgacactcaagtcaacttaattgtcacgatcaacaagaatattgggcataacaatgataaaaaccagacaatagagcgtaaagttgcccaattgcttaagtaacaaatgccataaatcacacgtaaaataatataggcccagcccaatcttaaaataaagtattcaggaaccaccatatattcagccatcaaaatagctgttaaaaataaaggtaagctttcaaaactgttttgttgtactgcatttgcccgagcagcaataccctttgtattagcaagaaaatctcttgggttctgattatcgacgggctgaaaaccaccggtaaattttgcaatcacggtaaatgcgtatggcagcaaacatgccactaaaataatatagataatgctgctgatgccgtgcatagtgccatccatcactgaaaatactgttgatcatgctatcataactcatcgtttttacctgaaattttatgcaaccgcatgtcatcactgatttatagggctatgtatgcaacaacctgatcaaaaagaattattcgaggtcttagaaaagcaaaagaagaaccagcttcaggtagatcgtatattcaaaattgtattaccgatcgtcgcttttttattaagtgtaatttgtgcgaattttaattggcaatctacactgggtaccttcgtgatcttaacagtgacctttattgctgtgggtgtcaaaagacttcctttgtggcactggctcattgtgattaccatatattgtcttgtagataattacctcagttatggtcaacttgatgtaactcacttacgtctacaactcggtaccatgttagtttttgtcggtatggtcggaattggtcgcccttatgtagatcgttggtttatgaaaaaccattaaaataaaaaaagcgccttacggcgcttttttattcatcattacgcaggcttacgtaaatctttacgtaaaattttgcctacatttgattttggtaattcatccataaactcaacataacgagggcgtttatagcctgttaagttttctttagcaaagttcaaaacttcttctgtagttaagcttggatcttttttcacaataaagagttttggcacttcacctgatttttcatctggaacaccaattgcagcaacttccaatacttttggatgtttagcaatcacttcttcaatttcacttggataaacgttaaagccagaaaccaaaatcatatcttttttacggtctacaattttgacgtatccacggctgtccattacaccaatgtcaccggtacggaagaaaccatctgctgtcatgactttagcagtctcatctggacggttccaatagcctttcattacttgaggaccacgaattgagatttccccttgttcacctaaaggtacttcttttccgtcatcatctaaaattgcaacctcagttaacggtaatggaataccaatggtgccactaaattcagtagatgcaggtggattcgcagttgcaactggtgaagtttctgataagccataaccttcaataatagttgtaccagtaattttcttccaagcttctgctgtagatggaagaactgccataccaccgcccatcgccatttttaagttgctatggtcaagttgcttgaactcttcattattcaccaaggcattaaataatgtatttactgcagggaagaaagaaggttgatatttacgtaattccttaatcacagccggtaagtcacgcgggttcggaattaagatatttgcctgccctttgtacataccgtacatcgcacaaaccatgaacgcaaaaatatggtaaagcggtaatgcacaaacaatacgatcgcctttagcaccatcgtttgcaccgaatttgctttggaaaataccatcacactgtaaaaggttggcaaccaaattgcggtgagtcagctcagcaccttttgaaacacccgttgtaccaccggtatattgaagcacggcagtatcacttaaagttaaagtcgggcgtttataattgcttggattttctttatttaatgcactgttaaatttaacatgcccaggaatattccaagctggaatttgtttacggactttacgtaaaacaaagttcaccaaagtacctttcagtgtacctagcatatctccgacagaagcaacaactacatgcttcactggagttttacccaaaatgctttggtaaacacttgcaaagttctcgataataacgagcacttctgcacctgagtcatttaactgatgctcaagttcacgcgcagtatatagtgggttaacattcactaaaaccaagcctgcacgtaagactgccaatgccactacaggatactgcagcacgtttggcatcattactgccacacgcgtaccttttgctaaccccaaattttgcaaataggtcgcgaacttacggcttgcaagctccaactcgttaaatgacatggctttatccataaagataaaggcatcacgagaaccaaatttttggaaattacgctcaaaaatatcaacaagtgaggtattttctgcaggcaatgctactgtttctggaatccctgtcttttggtattctgcaaaccaaatcttttccataatgccattatctccgattcgtaatccttagtaataactgttattcaatgccccagctattctttagcttcttggtgccagaacatatttaaaacttattggcacattcataacactttcgaacaagattatgagacagaagttttgacaatttaagcctgccaaattttttgcatggagtacaaattacgtactccaaattgctgcccttttaatcattattcaataccaacaagttcagttcattgcttgaacatgttgccatatatagcgtatttatgttgccagacgctagctttatctctgaatcaacagtttatttgctttttgatatccacgtggtaagagctgacctttcgaagcacgtttacccatgtatttttgtagatcatcaccttttaatttgagatgttgttgacctgcaaccacctgaattatttcatctaagttcagggttgtcatggataaaatttgctcttttccttcaagttgtatcaacttattacctttacctttatttaaatttggtagttctgccaaatctaaaattaacaaacgccctgctgagctcagtacagccagatgcgtcatgttttgggcagaaatgagtggtaaagcctttgccttatccggaaccgttaagaatgtcttaccggctttcgcattggtatctaattgcttggtttgcgttttaaaaccataacctgccgaacttgcagcaatcaattcagactcatcatcatctaaataaacctgaataaacgatacgccacttgctggtgataatttagaacttaatggatcccccaagcctctcgctgaaggtaagttactaattggcaaggcatagctgcgccctgtttcatcaaggaagtaaactcgctgattggttttcccgacagcatgacttaaatattggtccccagcacggtagttcagattttcagcatccacatccgcaccttttgccgcacgaacccagcctgcttcagacaacacgactgttaccgtttcggctggcattaaatcctgttctttaatttgaaccgcttcagcacgtgcaacaattggagaacggcgctcatcaccgaactttttcgcatcttcttttaattcgccaataatcaaattttttaaagattcaggattttcgagttgttcacgaataatggcagctttcgcggaaagctcatcttgttcatgacgaatttccatctcttcaagctttgccaaatgacgtaatttaagctctaaaatcgcctcggcctgtatctcatcaatattaaagtgttccatcaagactggcttaggctggtcttcttcacgaataatacgaatgactgtatcaatatcgagataagcaattaaaagacctgccaaaatatgcaggcgcttttcaatacggtttaaatggtactgcaaacgacgagttaccgtttttttacggatctcaatccattccagcaaaatacgacgaattgatttcacctgaggacggccatcttcgccaatcatgtttaaattgacacgatagcttgattctaaatcggtggtcgcaaataagtgactcatcactgcttccgcatcaatacggttagagcgcagtacaatcacgagtcgtgtcgggttttcatgatccgactcatcacgcacatcgacgactaatggcagctttttagcctgcatctggtcagcaatttgagtaattaccttagaaccagagacttgatatggcagctcagtaattacgatttcatttttctcaatggtatataccgctcgcatacggtaactgccacgaccagtggtctggattttgagtaattcttctggcggggtaataatttcagctttggttggtaaatccggagctggaatatattcagctaatttttcgtccgaggtttgcggattacggattaaagcaattgtgccttttacaacttcacgcaaattatgtggcgggatatcagttgccatcccgacagcaatacctgtcgtaccattaagaagaatattaggtacacgtgcaggtaaagtgatcggttcttttaaagaaccatcaaagttatcttgccattcgctagtgccctgacctaattcgctcagcaataattcactataagccgagagtttggcttcggtataacgcatcgcagcaaaagatttaggatcatctggtgaaccccagttcccctgaccttcgattaaaggatagcggtaactaaatggctgagccatgagtaccatggcttcataacatgccaagtcaccatgtgggtggtatttaccaagtacatcacccactgtacgcgctgatttttttggcttgccactgctttttaagcctagctcgctcatagcatagacaatacggcgctgtacgggctttaagccatcactgatatgcggcaatgcacggtccataatgacgtacatggcataattcaagtaagcctgttcagtaaattcggctacagagcggttttctgtcgcatgatgcgcaaggctggtcatagtcagcttatcttccaaatcagtcgttattttaagtgtgtattatgctaagtgggctatgttacagacacaagggggactctgtcacctgagcgtcaaattgtgtcttatctctctatatttttagttacttgctataaagttaggcaaaaactatagcccaattgactctagccttttaccttgagtctcttcacctaatatcaaaatcactaaagctacggcaagtaaaaccacagtaaacatcataaaaacgtgattaaagccgtttttagcaaccatcatatgtgtcacgaccattggcgcgacaattccaccgatacgccccattgccgatgcccagcctgacccgaaagcccgaatattggccggatattgttctggtgtataggtatataacactccccatgcacccaaattaaagaatgacatgagacagccccagaacataatgctatttacactgtcggcttgtccaaagaaatatgccgacaaagcacaaaaaccgataaatgcggcaagtgtaatttttcgacctaaacgctcgacaaaccaagcagccgccaagtagcccggtaactgcgccaaaatcataagcaatacatattcaaatgatttgacaatgtcatagccttgtttcaccaataaactcggcaaccacgtaaagatgccgtaataggaatacacaatgccaaaccagattagccagagcattaaacttctacgagcaaattgaccactccaaagctgtttaaatgaaactttttgtcgcatcgccacaggcacgacttcaatatggtgaacaatttgcacacatgcttcggcttctagtttttgtaccagtgcatgcgcttcttcgatacggccacgattaatcaaatacggtatcgactcagggacttttttccaaatcactaaaatataaataagtggaagaccgcctataagaaaggcaatatgccaaccaaatttaggaataataaaataagaaatgagtgcagcaactagccagcctaatccccaaaaactttcaagtagaacgataaatcttccacgaacatgagcaggcacatactcactgaccagcgtgactgctacaggtaattgaccacctagccccaacccaacaataaaccgaaaaattaatagccacttcagatctggagcaaaagcacataacgcagtcgcaatactataaattgccattgtcatcgcaaatacagttttacggccaaaacgatctgccaaggcaccagaacaaactgcacctatagccatgcctacaaagccaatactgacaatccaaccgctttcaactggtgttaatgaccagtctttaacaagggttgtcataataaaagcgataatgccggtatccatcgcatcaaacatccagcctaaacccactacccataaaagcgtgtagtgaaatttgccaattggaagattttgtatacgtgaaatcagatccataggattaactctactggaaagaataagtggacaagaccatatatagaattgttatatcatgcccacatgaaattctgcatgattaatgttcgtcggttgaagaagccgactccgcatcatcatctttataaataaatttaggcatttccaaaccaaaataaatggcaattaaacgaagcgtaaaaccgaatactaaggttgaaataacggtaagttctaaactcaaacctaagtctagacagacccaatagcaaatgactgcaacaaaagaaatacttgcatacagctcacggcggaaaacaaacgggacatcgttacataagatgtcacgtaaaataccacccgaaactcccgttaaaacgcctgctacagccgacacgacaaaaccatgccccatctgtaaggcaatctgacaaccaataatggtaaatccgattaagcctaacgcatcgagcaccaagaaaatgttatgtaaatgacgcatccatttagcaataacgatggtaacaaatgcagcacaacacgttaaaactaaatattcaggatgttttacccacgttaaaggatagtgtccaagtagtacatcacgtacagagccaccacccaaggccgtcacacaggcaattagtacaacaccgaaccagtccatactccgtcgcccagcagacaatgcaccagtcatggcttcggcagtaatcgcaataatataaataacggtgagtaacattgccctttccctcaggccaaacggtgggcgtattttaagataaagttataggaattgtgcacagcattgtttaaatttttttcctgaaccacatatacaaggttgtttcatggtgacctgcatatcgaccgttggatcaaggaaaaaccattgttgctgatgaaatacaaaatgtgaaacttcatgatgaatttgagcgcttttaccatcatgataatgggccttgaactctacctgtgcatgggttttatctaatttttcgttggcgttaaccacctctaaacccaaccattgattttgtttgctccattccgcaatagcctctttatcaagagcagtttgctgacctaaagccgtcgtttgcacaatataatcaatttgctgcaatgcaaatgcactataacgtgaacgcataagctgctctgcggtgagtgcttttgctgtgcctaaatgtaaaggttcacaacattctgcatagctgccttttccgcatggacaagtttgttgggtcatttggtacttctcaaataaaaaatagctcaaagttgagctattttatgatgtttctaaatctgacacgcaatttaatctttcgattcatcttgttcgatagaaacaatatgaactttctcgattttatggccttccatggttacaacttcaaagcgataaccatccgcttcaacagtttcaccattttcaggtaaacggcctaaatggaataataaataacccgataaagtagaatattgttcactttcatcaactaagtcacgaccaagtaaaagcgatacatgacgaatatcggttgaaccttcaagtattaacgaaccgtcttctaaactttctgctgctgcatctagttcgtcttcatcagggaactcacccgcaattgcttctaaaatatcaattggtgtggcaataccttcaattgaaccatattcatttagaacaatcgccatttgtaaaggagcctgacgtaattgctccatcaccataagcacttgagcattttcatgcacaataactggctcacgtaagtgcttttgaaaatcgataacgcctgtttcaataaagccatttaaaactttatgtgtaagcgcaataccttcaatattatcaagttcaccacgagcaacaattaaacgtgaatgtgtcatcgacattaaacgttcttttaaaacttctggttcttcgtctaaatcaatccattcaagctcaggtcttggtgtcatcactgactttactggacgttcagataaaccaagtacaccttgtacaagcacactatggtaagcgccattttcttcatcaaagacttcatcagcaaaagcttgagttgccaatacatcttctttatcagccgtttgagcgtctgaagtagaaccgctatttttactgcctaacatacgtaaaacagcagaagctgtgcgataacgtaaatctgtagtagtcactagcttctcttggttgcgacgcatggtttggttgatcatttcgactaaaatcgagaaaccaatcgcagcatataaataacccttcggaatatggaaaccaaaaccttccaccaccaaagagaaaccaatcatcatcaagaagccaagacatagaataactactgttgggtgtttattgacaaagtccatgagtggtcttgaagcccacagcataatacccacagcaattacaacagcaaccatcatgactgacagttctttcaccatacctacagcagtaattacgctgtctaatgagaatacggcatcaagcacaacaatctgaacgatgaccatccagaacgcagcatgaacaggattatcttctttatgaagttgtttaccttccatccgctcatgcaattccatggtgcctttaaagagcaagaacacaccaccgaacaataaaatcaaatcacggccagagaatggatggctaaaaatatggaaaagtggttgggtgagtgtcacgacccaagcaattgaagctaagaggataagacgcattcccaaagcgagtattaaacccactatacgtgccttagtacgttgttctggtggcagcttttcagccaaaatggcaataaagacgaggttatcgatccctagtacgatttcaagaacaattaatgtcgctaggcctacccaagcagacggatcagacatccattcaaagatcattgatcctgctcctgtgctgggtggattttatctttattgggcaacgcaaaaggcatgcctagacaaagggggaataatgtttttttaggacaagaaattaaaacggagcgactacaaccactacccatatttgttcatatgttgttaaacgaattttcagtataggcaagatttaacataaattcatcatttttatttgatcattatatgtattcaccaaacccatacaaaacatgaatctttcctataaaactgcttataaagttgtcatattttttgcttagtgtagacaagaaatatgaacgtgataaggtgaaaataaagcaatgaatagcgtattaacaatggcagtaaatgattcaccaataacatctgtaaaaacaacacaacctcttattgcattatattgtggctcacgagcaggaaataacccgatttatcgcgaaaaggcaattgaattagccagcggaattgctgaacaaggttttggtttggtctacggcggtgccagtattggtttaatggggcaagtcgcagaaagcgtacttgcacatggtggagaagctgtaggggtcattcctgaatttatgcttgattatgaagtggcgcatgcaggactgaccgagttacatgtagtagaaaccatgcatgagcgtaaagccatgatggcagagcgcgcgagtgcttttatcgcgctacctggcggtttaggaacattcgaagaaattttggaaattgcgacttggggtcaactcaatcagcaccaaaagcctatgattttatataacgtaaatggtttttataatgcattaattgctcagttagaccatgctgtacaagaaggcttccttcctcttcagcatcgagctaaattaattgtatgtgaagaaatcgaccaaatttataacgtcattaaaaacttaaaaatgccaaagagatttgttgtttaagctctctacctcaacaaaaaagcggattcttccgctttttttattttatctatctatactcattttataatcattcacttgaaagtccggttatatagttgctctaaataatagaagttaaacttacaaagcgtttattcaacattgacttactttttttaaattcaatttgttttacactaggcgaaaacgttaattttcaaatgttatgaatgccacgccaacccatcaagccttgcaacccgaatatcgcctattggttcttttggtttccattggcttttttatgcaggcattagatacaacaattgtaaatactgccattcctgcaatggcacatcatttaaatgaagatccattacgtatgcatagcgtagtggtggcttatgttttatctgtagcggcctgtattcctttaagtggatggttggccgaccgctttggtgttagaaatacgtttttatcagcaatcattattttcacacttgcttccttaggctgtggcctttctcaaagcctaaatcaacttttatttttccgtgtcattcagggtgttgggggtgcgttattactccccgttggtcgtttatcacttttaaaaattattccccgaactcaatttttggcagccatgagcctcatgagtctagcaggtttactaggccctttagcaggtccaacactaggtggttggctcgttgaagttgcaacgtggcattggatctttcttattaatattccaatgggagtattgggcatattaatgacattaaaggtcatgccaaatgtaaaagagcctaccgttaaaacttttgaccttattgggtttgtgctcttagtcatcgcaatgattggctggtctttgggtattgaacatcttgcctcacctgaatattccaaatggtttagtatttctttattagtggtcggggcagtcgcaaccctttggtatgcctaccattcacatacccatcaaaatgcattgttccgtagccgactctttagaaacaagatttacgcgattggtattttaggtaatttctttgcccgctttggtggtaatgccttaccttttgttttaccactcatgttacaagtcgcttttggttttgagccattcattgcgggattaatgatgattccgctagtgttagggtcgcttttctccaaaccgattgttagaccgattatccagaaaatgggttatcgccgctttctattaattaacacaaccttagtgggtctatgtattgcgtcttttaccattatgactgttgacaccccaacttggtttagagctttacactttttcttattcggtacattaaactcattacaatttgtgggaatgaatacacttaccttaaaagatttgcctcaacaagatgcaagtagtggtaatagtttcttatcaatgattatgatgctttcaatgagtattggtgttgcactggcaggtactctcattaatgtatttaccgattactatggtacagcacatgtgacaactgccttccatgttaccctcatttgtttaggctgtattaatatcattaccgcactgatcttttggcaaatacccaaaaatacgcctgtgtaagcagttgcatttttagcgtggtttctcgctcgcgaatcacgctatgatgtgaacttcatattaatactgagttttgcatgaccaagctggcaaaaaccttttctgcaccacgctacaataccctcattgggattgttttagcttgtgttatgggggttctcacctacttcggtctgttctaccagcaaaaagctattgctcaagattatccagttcaaggctttgatgtctctcaccatcaagaaaatatcaactggaaaaaaatatcacccaaaaaatttcagttcgtctatttaaaagcgactgaaggtggtgattataaagatccaaaatttcaagaaaactggttaaaagcacgcgaacatggctttcatgtcggggcttatcatttttaccgtttatgtcgtgatggtaaaacacaagctgaaaattttatttcaaccgtacccaacaaagctgatgcccttcctcccgttattgatctggaatatgacagcaactgtattaattctcataccaaagaacaattacttaaagaaataggcatcatgcatgacagcttaaagcatcattatggtaaacagcctatcttttatatttccaaaactttttatcacattgtattaataggtagtttccctaatacacctctttgggtcagagattacgaagggaaacctgagctgaaagacaagcgaaaatggctcttttggcagcatagtaatcaaggtaaaattgaaggcatgacaaagccagtagacttaaatgtttatgaaggttcagtcaaagaatggcaccaatttttacagcagcaaggcatcgtgaaagcacaataatatgcgcaaaatcattcatatcgatatggatgccttttatgcatcggtcgaattgcgagagcgtcctgatctaaggcatctcccggtagttatctcttcgcatcacccacgcgccgtaattgcagctgcttcttatcctgctcgtcagtttggtttacgctctgccatgtccatgagccaagcaagaaaactatgccctcaagttgttattattgagccgaatttcgaaaaatatcgtgccatctcggctcaaattcatagtatttttcaacaatacactactcttattgagcctttatctttagatgaagcctatcttgatgtcactgaaaatttaaaacaaatcgcgagtgcgaccgaagtagctatgcatattcgggaagatattttcaggcaaaccggactgacagcctcggctggtgtagcacctaataaattcttggcaaaagttgcgtccgactggaataaaccgaatggcctgtttgttataaaaccttctcaagtagccagttttattcaggacttacccttaaaaaaaattccaggagtaggcaaagttacccaagaaaagctccaacagcttgagttgcatacgctaggtgacttacaaaaaattgaagaagctgttttagttcaccactttggtaaatatggccaacagctttatttatatgctcaaggtatcgacaaccgccccgttcaagctgaacgtgcccgacagcaaatttcgaaagaaaccacatttgatagtgactttactttagcccagtgccaaccctactggcatggtctagccgaaaaagtctggcaaagtttagagaaaaagcaactgaatgcccgaggtgtaaatattaagctcaaacttaagaatttccagactttgcaacacagtaaaagttttaaaaacccaattcattctcaacaagacctgattcaagttttattcttacttttaaatgagatgcatattcccgaaaacttccaatttcggctcattggtattggagtttatcaattacaaactaaagctgacgactttcagttgtccttatggtaagtgttgtttttttatacaaaagaacaagttttaaacaaaaacagttcccttttgcttaaagtttgaagtaatctaatcagcgcatattcattacccatgtatttgcaacatgccaaagcaacctttactttcggcatatcgtcctgtgattggcgtgacgaccaaatccgaatattacagggcacttaaagtacatggagcttgcccgttcttataaatcacaacaataatctactgaaattcttttgcacttgcttgcacctgcctacgaactcttcataaaatcgaactattcaataaagacactttagagcatttttatgacggtaaaacgcttacacgtgacttcaagatattgtgaagtggcgatttcgggtaatttagtccatttagcagggcagctcgctgatgacaccagcgtggatattacggcgcaaactcaacaaactttggacaatattgatcgcttacttgctgaagccggaactgacaaaagtcatatcctgtctgtcatgatttttctaaaggatattgataaggactatgcagccatgaatacagtatgggatgcatggattagcaaagagcatccacctgctcgtacttgtgttgaatctaaactttatgcacctgatgtacttgtagaaatgaccgttgttgcggtacttccttaattcttattaattttaattaataaaaaaactgagcaagatcatgatcgatattgctcattttttatacttttaaagttgataatatcagcatttttaaaatcttatttaatgaggcttaaaattaaatcactgtaagacctaatttttaagactttacaaaagcatttgaaattctttctagctgaggcgttacatgtaaagttgccatctctgattcaggggtcaataagtctcttcttaactcatgataatctggcacagtgctgtaacttaatacacgatagcccgcaagctgtaataaacggcgctcatattgttgatgtgctcggcgtaaaccactttcttcaagcataaccactacaacaacctgataattttgatcaagcacaacaaagtcagctgtcatattttgatatttgcgacgagtgtgagcatatttcgttgttaataatgcatcaaatgaaacatgagctaacacagtaaatttaggcaatactgtctgtaaacgagttaatgtcatttgttcatgactacttaacacggcacggcgctttaaagcactgtcttgttgatgctttcttgagaggcttttcgccgccataacaacggtcaaaaatagtaataagatagtaattaaatagtacatgggtccatcctttaagttttttataatgattttgctagatcacgctttgttttaattgataacgacacagccgttctttaaaaggttcacttagtaatttcacttgtagttatcaagcttggcttaaatttagccaccctcacattatttataaacacagactcagcaacaatcaagtgcagctcgtcagatttttaggatttatcatttttcattacactttttacataaaaaatactaagaaatctcaccatatgatttatccactcactttaaaaataaaaaaggctcttaaacagagccttttttatcgttatccacgagcttttgattttggtttacttttaccaccaaatggtctcttttcacctgtctcacgaggtggtagacccgtatgttgagtcagtacctgccctttttgcggtcgtttatgctgatttttattttgaactgtttgacctgaacgcttcactgaatcgcccgcaacagtcgagttcttcttacgtgcagatttatattctccttccgcccctttcggttgataagttggaattaaatgttgctttgagttaccaattaaatcagcacggcccatttctttaagtgcttcacgaagtaatggccagttatttggatcgtggtaacgtaagaatgctttgtgcagacgacggcgtttttcaccttttacaatgtctacattttcagtgtaacgcgccacttttgcgagtgggtttttccctgaataatacatggttgtcgcagttgccatcggtgatgggtagaacgtctgtacctgatcagcacggaaaccattcttcttcagccagatcgcaagatgcatcatgtcataatcagaagtacctgggtgtgcagcaataaagtaaggaattaaatattgctcttttcctgcttctttactaaagcgatcaaacatttgtttgaaacggtcatacgtaccaatacccggtttcatcatcttagataaagggccttgttcagtatgctctggtgcaatttttaaataaccgccaacatggtgttgtaccagctctttgacatattcaggattcaatactgcaaggtcataacgtaatcccgatccaatcagaatcttcttcacccctttaatcgcacgtgctttacgataaagctgtactaaaggtgcatgatcggtatgcaagttttgacaaacacccggatatacacaagaaggtttacgacagttcttctcaatttcaggatctttacaatgcaaacggtacatgtttgctgttggaccacctaagtctgaaataataccggtgaagttcggcgctgtatcacgaattttctcgatctcacgtaagatcgaatcttccgaacggttttggataatacggccttcatgttctgtaatcgaacagaatgtacaaccaccaaaacagccacgcataatattgaccgagaatttgatcatatcaaatgcagggaaacgcgcatctccatatgcaggatgcggcaaacgtgcatatggcaaatcaaatacataatccatttcctctgtggttagaggaattggaggtggattgatccagacatcacgctcaccatgacgttgaaccaaagcacgtgcattacccgggttggtttcaaggtgcaaaatacggtttgcatgtgcataaagtacttgatcattcgccacttcttcaaaagaaggtaaacgaattacagccaattctcgcggaggtaacttgtgtttaatcgcttttgactgagcaggctttagctgaacaatctgagtattttcatcaagttggtcgccttcacgtacaatcggatttgcaacaatttctttttgaaaaccttgatattgagctagtgtgttgcctttatctttctcaatttcacaaccatcaatatcttcagtcatgacatatgggttaataattgggtcaacacgcccaatcgtatctacatcattactggcaatttcaacaaattttgctttagccgctttgttatgtttattaataataaatgctgtaccacgaacatctgtaatctcgtggattttttcacctttagccaaacggtgcatcacatcgataatggctcgttcaccattaccatacataagcatatcagcttttgaatccatcaaaattgaacgacgaactttgtctgaccaataatcatagtgcgcaatacgacgtaaactaccctcaataccacctaatagtacaggtacatctgggaatgcttcacgacaacgttggcaataaaccgttgccgcacggtcagggcgtttatttggttcgttattaggagaatatgcatcatccgaacggattttacgatctgccgtatagcggttgatcatcgaatccatattgcccgcagtcactccccaagcaatcgttggcttacccaatacacggaaactttcaacattggtccagtctggctgtgcaataataccgacacggaaaccttgcgcttcaagtacacgtccaatcacacccgatacaaatgatggatgatcaatataagcatcgccacagactaaaataaagtcacacgcatcccagccgagttggtccatttcttctcgtgacatcggcaaaaatggcgctggttcaaaacacgacgcccaatatttgtcgtaatcaaacaacgcttttggcgcagtttgcatagtataagcggtagacatggcttgcgaatctcggctagcagatggaggagagacatctaaagatgaaagccgatcattttaacatgaatttcattcattttccttgtttataaaacacgcgaaaacaataatatagaaattaatttgattaaagtttgctcaatattttattcttagattaaatacggcggaataaaatccgccgcagatcgaactcatttatttatataatttagaaaagagcttttggtaaacgaatctgaataatctcgttatcatcggccaactttgcattacgtcccgtcgacccagggaagttattatcattgaaaaccgtcagtgttgtaccattttcaataattacatcttcaatggtttcaaatgggaaggcaaaaacctgtcccgtaccaatatcccctgctctagctgtgccatacaacatattcgggttagcaattttaattaaatcaactaagtcttcgcggctgaccagctggcctgactcatttaatttaatacggattaattttttatagccgcctaaattattctgcgtggcatcacgttcaataatgatcccttctttatcattaaagagttggaaatcaccaatattggtagctttactgtctaactggaaccaataatattttcctgtatacgcttttttcttcaggtcaaattgagaaatcagcaactgtctttctgtttcccgaattgatttaattggcttttctataagcggatagagatactgcccatctggcgaaatcgccattccttcaaaaccgccactttgttggacaagaggttccacaaaattaatttgtgctttattaaattgattttgtggtgaacgtaattcttgagtcggatttaatggatttggtaaaggaatcggagcgtctaaaagtacaccatctgctgagaaatggagtaaatatggaccaaattcatctccaatccagtaagtcccatcactagtacgctgcatcgactctgggtcaaaatcagcacccgttaataaacgctcaggtgtattaccattgatgatattaaatggaattaatttattcggatcacgcagttggataaaactttgtacattaacttgaccggtgcctttagttttagttttgaaatcaggctttattttataaatacgaagtaaaaagtctgatgaattatcttgagtgccaaaaccgttatcggccattgccatataactgccatcttcattttttaatgctgcagaaaatccctgtacaggttgacctttaaacggaggataaattccatttgcacctttcacatatgcccctgagtctggtccagcagcataagtttctacaggtaacttagcaaaagaaattagagttggttcggtaacgttttcagtaggtgaagtttgatcttgatcgttatcatcgttacatgccgtcaatcctaaactggcacagcataataatgcgattaaagtttttttgctcatgattttatacagttggtaaaaaattaagcaaatttaatcaagcttgtatgaagtttttgcttcaaaaatatgaaatctttatggcgaaaatatgacaagcctattgtttaacacccaatagaaaaccgaacttgttagtaaagctaattaaagttttgttggctgatattctccagcaattgctgcttttaaaaatttttggaaagtgggacattccatatgattttcagcaggacatacagcagcgtgttctaatccctggctgataaaatgcaatcgctttgccatttgctctaattgttcagctttatcttttagtttttgacggtcaagatcaggcttaccatcttgcccaaacattgtggcaatttcatttaaagaaaatcctgcagcacgacctaaagcaattaatgctagttgatcaattacttgtttgctgtattgtcgacgtaagccttgccgccctatcgatttaattagtcctttctcttcataaaaacgtagggtagccgttgtgacttttgccttcttagcgacttcaccaatatccataacatcctcttgacttcaagtgaacttgaacttgcacaataaatttatcacgtttcatacgtataaaagcaaggtgtaaaaatgaatacctccactctgttctttcaagctttatgtcttggtattggtgcaaccatcgttatggatatatggctattaatactaaaaatatttaaggtcccgactttaaactttgcctttcttggacgttgggtgggctggatatttcaaggaaaactcgtccatcaatctattgctaaaagtcctccaatgaagggggaatatttattaggctggattgctcactatagtgtcgggattatcttcgcattgagctttcttttaattgtaggttcgacttggctcgaccaccctcagttttactcagcactactgtttggtttggtcaccgttcttattcctttttttattatgcaaccagctatgggtagtggttttgcctcatcaaaaacacctcacccttttttgaactgtctgaaaagtttgctgaaccatagtgtttttggctgtggtttatatctcactgcaaaactatttcaaatttaaataaagggaaatttccatgaaaactgttgccattatttaccatagtcgccaaggccacacccaatttattgctcagcaaattcaaattggcgtcttgagccatcacaatattaaagcagatttactcaatgccgaggatcttatcgagcgtccagaaattcttatccaatatgatggattaatttggggatctcctacttatttaggtggtgtatcttccaagttaaaacagctcatggatgcaactggaccattatggaaaaaacaaagttttaaagggaaattagcagctgggtttaccgtttcatctcttcctgctggtgataaacaatccacactaatttcaatttttactttttgcatgcaacacggcatgttatgggtaggtaacccaattctaccagaacagcatcaaggtgttgcctatacacaagcagctaaccgactcggttcatggtcaggtttaatggctcaggctgaacatgctagtaatgcagatggttttgatgagggagatattaaaactgctcaacaatttggtgaaaattttgcattgaccttaaatgcttatcaagggacttaacaccatagttgaaaaatacctgtaagttaaaacgtacaaaatttggggtcattaacggatattcaacttgagtattttttcataacatataaatcatagagagacaggaagtctcattgaagaagaataagaacgcaggaagcggtagttgacaggagttagctacataaagctgaatacgaagaaacctcgacaggatgtcggggttttttcatttcaataatacaaaaatcttactttctgcttgggctgagcaacagaacttatattgatccaataaatacggctgaataccatcatttcatttgaaatttgattattggttttgtattttgcttacctcatctttagctcaagatcattttgcaccatcacaattacagcgccttagtctcaaattctttattattgcgttgatgacaataatgacgggatgtacaagtttaggccctaatagcggttcattttcttggcgctcaagtaagctttcgtctggcttacaaaaagcttattccgttccgccaagtacagcaaatcgcctatctccaatgattattcaaagcgctgatagatataatgttccaccgcttttattggcagccgtgatcaggcaagagtctagctataatagtaatgctcgctctcccaccggggctattgggttaacacaaattattcccagttattggcaacaaacttgtgctggtaacttgtatgatgaatctaccaacatccaatgtggtgcttatattttaaatcattactatcagacagcagatagctggttcaaagcgacagcatattataatgttggtccaacaggatatgaacgaagtttctggacacgccacaaagcaaaaaaatatgctcgatctgtgaaacgtcatcagaaaactttaaaaagtgctttataaattaagattaaataaaaaagcccatttattcatgggcttttttatatggttaattttattcgtcaaataaaccttcaaataaaacagaagataaatagcgttccccactatctggaagaataacaacaattgttttacctgcattttcaggacgttctgcaattttagccgctgctgccaatgcagcaccacttgaaatacccactaaaataccttcttgggtggcacactttctcgcccattgaattgcttcttcactactcactggtaagacttcatcaaccaaatctaaatcaagattctttggaataaaatttgctccaattccctgaattttatgcggtgcgggtgtaatgttctcaccattttttgtttgagtaataattggagactcagcaggttcaactgctactgagtacaatggcttattctgaacttgttcaaaataacgagaaatacccgtaatcgtacctcctgtacctacaccagctaccaagatatcaacttgcccacctgttgcttgccagatttctggtccagtcgtatcaacatgaatttgtggattagctgggttttcaaactgttgtggcaagaaataaacttctggctgttcagttgctaatcgtacagcttcatcaactgcacctttcattcccttcgctggttcggttaggactaaattagcaccgagtgcttttaacacttttctacgctcaaggctcatgcttgcaggcatagttaaagtaatggaataaccttttgccgccgctacgaacgccaatgcaataccagtattaccactggttggttcaacaatatgcatgccttcttttagcacaccacgcttttccgcatctgcaataagtgccgccccgatacgacatttcacagaaaaagctgggttacgactttctactttggctaatacaattgcatcagttttaatcaaacgattaatacgtactaaaggagtattaccaatagcttctgcattatttgaataaactgcgatacctaaattattgggtgttgggaattgtggatcagtagacatgttatatccttattagatttggaatgattctgaatcattataggcttgtcagttaaacaggaaagtagaaaaagtgaagtaaaataaaaaatggaatttacatcaaaaataaaaagatataaaaatagcaaaatcaaataattaaaatatatagtatccaatctaaagtaaactttcgctacagcattaaagcccaagtataattactaccaaagttcaccttctcgccaatctgcacaaatagtgtcctcttctgaactatttgatagctggtctttcatctgaatatttaaaggatatagcataatttcatactcatccgttagataactacaagtgttttgtttgatagataaatttcctttccaaacagtccatcctaatttttcataaaatgcttcatcttctggttgtaatgcagcaagcccatattccagatgagttaatgtgtctactaaatattttaataattgtgatgcaagccccttacctctcatcgtgtaatcagtggtcacatactctacataagcagttttcacatcggaactaccatttatggtaaaaactctatccgtccataaggcatgtgagacaatttgattgtttaatataccagcgacatgaatagctttttgcataaaagcatattgagtccaaggatcttcatcaaaagcagaaaaacataactcagcaatctgatgacgttgatttctatctagatcttgggctgcgataattttgaactgcatagatgaaaactcaatttgaactatttatagattaagtaaatattggaatattatgaaattattctttattccattattttagttttaataattcttcaaataattcttttctgattgctttcttgatataaaaaaacaccccaacctcttttgagattggggtgtttagaataatgagctggcgatgacttactctcacatgggtaatcccacactaccatcagcgctaagaggtttcacttctgagttcgggaagggatcaggtggttcactcttgctatggtcgccagcacaactgtttatggatacttgcttaggtcttacttgatgccgaagcgttttccaaatctgtaacagactgggctgattgaatcttactttatctgttcattttagctagaggtataactaaatcaagttgtcttgcatatttaagaatcgattgatgctttatatacaactgcttgggtgttgtatagtcaagcctcacgagcaattagtattggtcagcttcacatatcactatgcttccacatccaacctatcaacgtcctagtctcgaacggctctttagaggacataaagtcctagggaaatcttatcttgaggtaggcttcccgcttagatgctttcagcggttatcccttccgaacatagctacccggcgatgcgactggcgtcacaaccggtacaccagaggttcgtccactctggtcctctcgtactaggagcagatcctctcaaatttccagcgcccacggtagatagggaccgaactgtctcacgacgttctaaacccagctcgcgtacctctttaaatggcgaacagccatacccttgggacctgcttcagccccaggatgagatgagccgacatcgaggtgccaaacaccgccgtcgatatgaactcttgggcggtatcagcctgttatccccagagtaccttttatccgttgagcgatggcccttccatacagaaccaccggatcactaagacctactttcgtacctgctcgacttgtgggtctcgcagttaagcgcgcttttgcctttatactctacgcgtgatttccgaccacgctgagcgcaccttcgtactcctccgttactctttaggaggagaccgccccagtcaaactacccaccagacacggtcctcgtcccggatcacgggacagagttagaacctcaacattaccagggtggtatttcaaggacggctccactggaactagcgttccagcttcaaagcctcccacctatcctacacaagtaaggtcaaagttcagtgtcaagctgcagtaaaggttcacggggtctttccgtctagccgcgggtacactgcatcttcacagcgatttcgatttcactgagcctctgctggagacagcgccgccatcattatgccattcgtgcaggtcggaacttacccgacaaggaatttcgctaccttaggaccgttatagttacggccgccgtttactggggcttcgatcaagagcttcgcttacgctaaccccatcaattaaccttccagcaccgggcaggcatcacaccctatacgtccactttcgtgtttgcagagtgctatgtttttaataaacagttgcagcggcctggtttctgcggctgtcgtcagctcaggaagcgagttccatcaccaacaacagcgtaccttctcccgaagttacggtaccattttgcctagttccttcagcagagttctctcaagcgccttggtctactcgacctgaccacctgtgtcggtttcgggtacgattcctgtgtaactgaagcttagagacttttcctggaagcatggcatcaaccacttcgctgtacaagtacagcttgctatcagatctcagcatagagtaccccggatttgcctaagatacatgcctacatcctttcacctggacaaccaacgccaggctgatttagccttctccgtcctctcatcgcattacacagaagtaatggaatattaaccattttcccatcgactacgcctttcggcctcgccttaggggtcgactcacccagccccgattaacgttggactggaacccttggtctttcggcgaacgggtttttcacccgttttgtcgttactcacgtcagcattcgcacttctgatacctccagcatgcttctcaacacaccttcatcggcttacagaacgctcccctaccacgtatacaaagtatacatccgcagcttcggcacatagttttagccccgttacatcttccgcgcaggccgactcgactagtgagctattacgctttctttaaagggtggctgcttctaagccaacctcctagctgtctatgccttcccacatcgtttcccacttaactatgattttggggccttagctggcggtctggattgttttcctcttgactacggacgttagcacccgcagtctgtctcccggatagtactcataggtattcggagtttgcatcggtttggtaagtcgggatgaccccctagccgaaacagtgctctaccccctatggtattcgtccgaggcgctacctaaatagctttcggggagaaccagctatcaccaggcttgattagcctttcacccctatccacaagtcatcccctggcttttcaacgacagtgggttcggtcctccagttagtgttacccaaccttcaacctgctcatggatagatcgcctggtttcgggtctatacccagcaactaaacgccctattaagactcgatttctctacggctcccctatacggttaacctcgctactgaatataagtcgctgacccattatacaaaaggtacgcagtcacaccacgaaggtgctcccactgcttgtatgcatgcggtttcaggatctatttcactcccctcacaggggttcttttcgcctttccctcacggtactggttcactatcggtcagtcaggagtatttagccttggaggatggtccccccatattcagacaaggtttcacgtgcctcgccctactcgtcatcattatgtgtgccctttcgtgtacgggaatatcaccctctacgttcgcacttcccagagcgttccactaaaacacacataacttaatgggctgatccccgttcgctcgccgctactgagggaatctcaattgatttcttttcctaagggtactgagatgtttcacttcccctcgttcgccttgcaacactatgtattcatgttgcaatacctaccttaaagtaggtgggttcccccattcagacatctccggatcaaaggatatttgccgcctccccggagcttttcgcaggctatcacgtctttcatcgcctctgactgccaaggcatccaccacatgcacttaattacttgactatacaaccccaaacagtcgatgttacctacaagttagtaacttcaacatttcagtttagagcactgtgcacttaagcaccgtacagcttcaatctaaattcacataccaaaacgcttgattcagttaatttgctagttctcaattcatctagattaattgcttaacctaaactcttgagtgaacaatttatttcagactcaattttgccaatctgttaatgagttaatgtgtcttcgtcagatcacactaattaccgtgataatgaaatcacagaagttaataaaccaagatctcaatctttatttactaatttctgtaatccgaacttatcttaagttctggtggagactaggagagtcgaactcctgacctcctgcgtgcaaagcaggcgctctaccaactaagctaagtccccagcttacatcatcaatcatgtatcttttatctataacttcaaccagtcaaagtcatggtgggtctgacaagacttgaacttgtgaccccacgcttatcaagcgtgtgctctaaccaactgagctacagaccctcagatacatctatgaagaacaacttgttgtggattcttaccaatcgtcaatctttcgttaaggaggtgatccagccgcaggttcccctacggctaccttgttacgacttcaccccagtcatcggccacaccgtggtaaccgccctctttgcagttaggctagctacttctggtgcaacaaactcccatggtgtgacgggcggtgtgtacaaggcccgggaacgtattcaccgcggcattctgatccgcgattactagcgattccgacttcatggagtcgagttgcagactccaatccggactacgatcggctttttgagattagcatcacatcgctgtgtagcaaccctttgtaccgaccattgtagcacgtgtgtagccctggccgtaagggccatgatgacttgacgtcgtccccgccttcctccagtttgtcactggcagtatccttaaagttcccatccgaaatgctggcaagtaaggaaaagggttgcgctcgttgcgggacttaacccaacatctcacgacacgagctgacgacagccatgcagcacctgtatctagattcccgaaggcaccaatccatctctggaaagtttctagtatgtcaaggccaggtaaggttcttcgcgttgcatcgaattaaaccacatgctccaccgcttgtgcgggcccccgtcaattcatttgagttttagtcttgcgaccgtactccccaggcggtctacttatcgcgttagctgcgccactaaagcctcaaaggccccaacggctagtagacatcgtttacggcatggactaccagggtatctaatcctgtttgctccccatgctttcgtacctcagcgtcagtattaggccagatggctgccttcgccatcggtattcctccagatctctacgcatttcaccgctacacctggaattctaccatcctctcccatactctagctcaccagtatcgaatgcaattcccaagttaagctcggggatttcacatccgacttaataagccgcctacgcacgctttacgcccagtaaatccgattaacgctcgcaccctctgtattaccgcggctgctggcacagagttagccggtgcttattctgcgagtaacgtccactatctctaggtattaactaaagtagcctcctcctcgcttaaagtgctttacaaccataaggccttcttcacacacgcggcatggctggatcagggttccccccattgtccaatattccccactgctgcctcccgtaggagtctgggccgtgtctcagtcccagtgtggcggatcatcctctcagacccgctacagatcgtcgccttggtaggcctttaccccaccaactagctaatccgacttaggctcatctattagcgcaaggtccgaagatcccctgctttctcccgtaggacgtatgcggtattagcatccctttcgagatgttgtcccccactaataggcagattcctaagcattactcacccgtccgccgctaggtccggtagcaagctaccttcccccgctcgacttgcatgtgttaagcctgccgccagcgttcaatctgagccatgatcaaactcttcagttaaaatcattttgcaccttattatagacaaggtgccaattctggctcatcaattactgacttaaatttcgctcaaataaacttcgagtaatttaaaccaatcaatcaatgaaaattatttcgattaatcaatcagtaaaaatccacacaagttgttcttcaattctcttaatgatcttcttactggttcgtcaccagcaagctaggtcggctatattactcttaatctcttaaaagtcaacaggtaatttcgatatttttaaaacttattctctaaaccatctcatcatcaaattcatcacttaaagcaaccaatctaatcacaagtaactgtttttcaacaagtttctatctgaatcaccgccgatggatgtgcattatagaccatctcagtccctttgcaagcgaaaattaaaatttaatgactcgagcgtttatttttaaatcaataccaatattaagcctttgttttatattgataattattttaattttttatttttgacttaaataagccagtatcatgctcgataattctcgcttaagttgttgttctgagataagaaaattgttttggcttacataacgcatcatcgtaaaaagcgtactattaataattacaaaggacttatgcttcacctgttcgaagtcccattgatgaggatttctactgaatgtatatagccctacttcaaaaaaatgcttttctaaaatctgagcagcttgcgaatgactatagtcatgccagtgtttcagcacttctataaaaaatccatgatcggcttttaatgcattaaatcccaactctattgctaagggaatgagcagctctaaaggaatatttccttgtcgcacaactaattctttaagttgttgccccagcaattcgcttttacggcgcaatagttcttctatgatttgatctttattctcaaagtattggtaaatcgacccaacacttactccagatttctctgcaattttaggcgtcgtcgtatgtagtaatccatactgggcgatacactgctgtgtcgcctctaaaatatggtcaacaataatttttgaacgctgttgctgtggggcttttctcatcgtttttttattcgttaaatgcgaattgaatgcgaataattattcatattagcctatttattattcagttcaataagtaagtaacgatatgcaaatgattagcccgactcgacttgcttcttttaatgatatgcaagacagtaatttctttactcagtttttaaatatctgttgtggaaaacctgtacaaccaaactataaagaatatgtgtctttacaacatgctctttatgaaggggatattgaaatggataaggtgattgattgggttatgcaaagtcccaaagatcaccgaataatttttgagaagatattatttcaaggccgtgatgaattctctaagcctatacctactgaattagaaaatttctttaattacattgaacaaaaacctgattggttagaccaacaacaaattgatgaggctgttaaatttacccatcgtttaggaataaataatggttttattcttagagacttatccttaatggcgggatatttatatccggggtttaatcaacccctaattttaacgggtgcattaaagaaagaagcgggaacacgtttagcagaaaccacaaaatggtgggtggatattactgaacctcaagggctttttcgtttgagtgcaggttttacgtcaacgatttatgttcgctttattcatgcactcgttcgccggcaattaaaaaagtctagccgttgggatagtgagatttggggaattcctcttaatcaatttgatttagcaatgactaatttggcttttagcagtgtcgttttactcggtattagagctttaggtatatggccaacaaaacaagaggcaaagagttttttacatttctggcgttatgtcggctggttaatgggtattgatgaaaaatggcttattcagtctgaacctgagggttggaggttactttactggatgcagtttgctcatcctcgctccgatcacagcagtattgaattaggattgagcttgtcgaaagaaccttttgagagaaaatatctgcatttacgctctttacagcagaaacttgcttatcgacaacatttagaacttacccaattttttattggtaagaaaagaatgaaactactcggattgcctcagcaatctgcctcatggtttgcttattatttaattgtgcgtaatttactactttataatggcgcaaagctttcaccaaaagttgaaaagtttttatctaaatcaggccgtaatatacaaaaacttggcttaacgctttatcagaatcaaggtaaggcaaaaaccttagcaagtatgcatcaataattctggaatctaaaaaagcaaaaaatggaagcccgttatccagacttccattttcaactattaagaaccttattgagctgatgaactatgcatttcagcgtgattcatttgctcatgtgactccatcatctgcttctttttttgacttggcatgtagtcaggctcattgttgatggccaagtaaaaaataatcataaacaatacactcaagatagaagccacaataagtaacttccatccccaccaagactgttcaggcgataatttattagtcatttcatttctctcattaaattaataatttcagttctttaattcgctaaagcttattaaaacttcatactcatacgaacccagtaatttcttccgatattgttaaactgctcttcgctcgcaaatccaaagcctgcactacccgctttatttaagtgttcggtataggtcttatctaatacgttatcaatgccaacagagacatcaatatctttacgaaggttataacttccgtttaaagaaagtgttgaaaaacctttacttggttttaggtcatatcccacgatattaccttgatgtagactcacacggttttgctcagcaacagctcgccataacagacctaagttatatttgtcagccacatagcgaatatttaaacgaccttctaaaggtgaaatttgaggtagaggtttgtcatctgtggtgtttttgccccacgcatacatcgcactcaaatctgcctgaatacggtcagtgaattggtacccaatacccgcttctgcaccagcgatggttgcatcgacatttttggctcccgcagtaatatcatggctcatatcatgtccatccattcccatacttgggtgatggtggtaactcattaatatgtagtcatctactaaacctgcataggcagaagcccatgtgtttaaagcaccatgttgttgctgaaaacccaggtccaactgtagtgttttctcaggattcacaccgttaaaagtattggttgaacccgcattaccatgtttaggcgagaaaagttcccaataatcaggcatacgctctacataacctaaaccaatataactttttaggtcatgctcgggatgttgattttcccagcgaacaaatgcgcttggcaaagtcttttcaagcttcgtgttaaagccttttgcttgagaatcagcacgttcatcttcaactgtgactcgatctaaacgtgcacctgtaaccagcttattttgatcgttccattgataaccaagttcaccaaaagcgccgtatgattgaaaacgcatatcttgacgatatggaacattcatagaaggcattgttggcgatgacatgctgccaccatgtttattaaattgagagtcaacgcctgtgatcaaactccatttgttccattcagaagtcattgccaaacgtgagtttaatgtacggcgtgtcacttgcatggccattgcatttggcatcagcatggtcataccaccatgattcatttcaactaatggtggtgtacgcaagctaaagttatccataatatggtcgttatagctatagttcacctgcccttcaattttcttgatcacatcagtgatatttttcttttcaaaacgaagccctaaactttcacgcgcaaactgagaaccatccattgaacgtccagcataaagcgattcaccatcagattttccacccgtgatttcgacccacgtgttttcatctggagtaaagccaagcgctacatcagcattccactttttccatgctgatggcacggtattgccatcaccatcttgataactattcgattctgaacggttggcatttaaacggatatattttttctcatcgccaacagccgcttcaatattatggtcaatacgcccatatgaacctagcaagacactcgcttgaccgcgatagggtttttcagaagtaagcttttcaggctgacgttcaaatagaactgttgcagctgaaccagtattggcatattgaaccgtttgtggtcccttaatcacagaaatccggtcataactttctggtgaaatataagaagttggagcatccattcggtttgggcaggcacccaagttctctgtgccatccgttagaattttaatacgtgaaccaaacatacctcggaatgtcacatcaccatttgttccaccgctttgaattgaattaaaacccataatactttgcagatagtctgcgccatctgtagcaggtactggctgaatcggttgctttgggtctgcatgtacgatcagaccatttgcatcgttgccttgctgtgctgtaacaacaataggtgctaatgaatgaagtgtgttggtttcggcatcatttttttctgattcggcaaacactagacccgaatgagagacagcaaacatcgcaacccataaaggttgtagtaaaaatttagaatgtggcatttttatacgctctaaaacataaataaagtgatatcgaagtcagttaagaccccaacaaaaattgcttttatttatgcaaatagaggcggcgcacgtccttgcgggagtaggaaaagtcgctgtagcgcaaagtaaacatgccggaaagcttgttgatacgcgactaagcgaacttgtatacgaacaagcacctcttttatgccaaattcaggtggtaaaaccaaattggcataaacggtacaatattgacactgatggttcgcatcatggtgatcatgatggtcaggtacttgcgcctgttcgatatgatactggtgatgtgaatggtgcatggcatgtgacatggcttccgtctgtgcttttggtttaagcaaagcacgggtaatagtttcacagaccggagcaatttgatattgcttcggtaatagcggttgtagaaataccgcaatctgtaaaaatactgctgcacaggcaagcagcaaaccactacgaaaaaccaaaaatcacatccacactatattggtgtttgaaaaatattaacgttttaccgcaactttttcacgttcgcgttggcgaacaattttttcgactttttcacgcgcacgctgacgcttaagtggcgacaaataatccacaaacaatttgccatttaagtgatccatttcatgttggatacaaacagcgagaagtccgtcagcttctatctcaaatgcttgaccttcaaggttaattgcctcaattttcacgcgtgacgggcgatcaactttgtcgtatatttgtggcactgatagacagccttcttcgtacggctgcgtctcttcagtcagcggagttactttggggttaatgaaaaccataggttcatctttagattcagacaaatccatgacgataagctgaatatgacgatcgacctgagaagctgctaaaccgatacctggtgccgcatacatggtttcaaacatatctgctgcaagttgacgaatttcatcagtaacttcttcaacgggcttagcaatggtacgaagacggggatcaggaaaacttaaaataggtaataaggccatactgtcgtcctcacttatgccattgattgaaaaaccaaatgaaggaaatacttcatcgaaaaattgtgtgtaagccgcccattataacgcaactgcacacataatttttaggaattatcataatgaaaaaggtttttaacggcatggttaattttcatgccttggggataaagaagcatttacttgctttggcgctctgtacaggtgtcgcaatcggtacgatagcagaggttcatgcaaccagtccgaaccataatccaccctcccttaaaagtaatgcacccaatgtatatgttgtaaaacgtggggatactttatgggatatttcaggacattttctaaataaaccatggcgttggcctgaaatctgggcgagcaaccaacatgttaaaaatccacactggatctatccgggtgaccgattactattatgtagcctagatgggcgtcctttagtcggtaaagatgagggcgatggttgtgtcggtattattcgccgctatacaggtcaaaccacaaacctacaaccacaagttcgcgtcgaagcattaaataatagcgttccggttattccacttgaacatattaaacagtggttagagaacagtactattttaccagccgactcaattaccaacacaccttatattgttggtacagccgatcaacgtgtacttgcaggaaaaggccagactatttatgcacgaggacaaggcttaattaatgggcagcgttatgcagtctaccgagaaggtgaaccttactatttcacagacaataaaggtaaaaagcatagtttagggattgagttactacaggttgcttcaggtgttgcggtatcttctgaaaaagatattactacattagaactaacagatagttataacgctgaagtacgtcgtggtgatcgtgttatgcctgaagagcaagctactttgccaacattattttacccagtagatgcgaagcaagtgacggatggtggcaagattattcgtgtcatgggctcaattggtagagctgcaaaaaatagtgtagtgactttggatcgcggtacaactcagggcattcaagtaggtcaagtttttgatattactcaacaaggtgaatcaattcgcgaccctaaaactaaagaagtaattcaacttcctggccaacaaattggcagtctaatggtttttagaacttttgatcagctaagttatgcttatgttttagagagcgatttaccaattaaggttggttcaagcattcagccacctcaatttaatgattaatgctggatgtaccttttacaatgctcactcaactttcttcacaccactaccacacacttaaagtgtggtatttggtgcagcactctttagtcagctttaaaaaaattattgattattttggaaattgtgaaaaagccactcaacctgatggtttagcaaagtggtcctctctggggctacatgctaatcacttaaagcgtgtaaacgaatttcaaacgccccaaggtcaagcgcagtttgaacaacttgtacaacaagttcgtcagcatacagattttattttaacgccggatgactctggctatcccactcaattacttccttatacagattatccacctattatttttgggaaaggtcaagcgcaagctttattgcaacctcaaattgcgattgtcggtagccgaaagccaagcccacatggacgacaggtcgcttatgattttgcctattacttaagtgaaaagggctttttcattagtagcggtctggcttatggcattgatgaagccgctcatcaaggtgcatctactcatcaacgtaccattgcagtgacgggtacgggcttagacactacttatccagctcaaaataaaaaacttgcagaacatattttggctaaaaacggcgccattattactgagtttttaccgggtacaccaccattacaacaaaattttccacggagaaaccgaattgtcagcggtttgagtttaggcgttttggtggtagaagcgacattaaaaagcggctcactcatcacggccaataaagctgctgaacaaggtaaaaccgtattcgcgattccgggtcatatttatagcgagtttcatcaaggatgccatcaacttatccgtgaaggtgcaattttaatcgaccatcctgaacagattattgaggatcttgctttaccaacccaatggcaaagtcagcaacaaaatcaaactgaagaagctaatacgaatactccagaaattcctgagcatttgattgacctttatcagtctttagactgggtgggacaaaatattgaccagcttgtagttcaccataatattccagtttctgaactgacctcttcactaatggaactagaactactcggtttatgtatgcaacaatcagggctgtatttacgttgtcgttcttagtattagagcgcacaatagcgattctgtttgattgaaaggaaagtattaccatgattacgacctcagtgaccgaagcagccgaatgtttacaacaaggtcaagttttggcatatccaactgaggcagtctggggactaggctgtgatccatttaatgaacaagcttttcaaaaaattcttgaattgaaacagcgccctattgaaaagggcgtcattttattggctggccatattagtcaagtagaacatctactaacttccttaccgcaaactactcagcaagaaattattgattgctggacaaaccatcaaccctcagaaagagccacaacttggctattacctgctgatcaacacatcccctcatggattaaaggcgagcatcctcttgttgcagtacgtgtaacgacacatcctttatgtgtcgctttatgcaatgcttttcatggttttattgtatcgacgagtgccaaccctagtggacaagaacctgcacattctttacaagatgcctgccaatactttggttcacaattaaactatctcaatggtgatttaggccaaagccaacagccaagccgcatcattaacgccttaactggtgaagtgatacgtccttaatttcagacaaaaaaaagctcagttatatagggataactgagcataaaaaaggatgggtatataccacatccagagggtttggatatctctggaacgaaagaaaaattgcttaaaagagcatctttcgtagtggtcgctattatgtggcaagagacttaatgtgagaaatatattatttctctaaaaaaagcatgaaaagtgtagggaatttggcgtttttagcagttgaattaaaattatattaatatttttattggccttttttaatatttatgttacacaatcttttcataaatatatttataaatcatatagaaaagcttagattgataaaaaactggcatattttcatcactttttttaaaaatatgccatagtttttttatgattcttaattttgctctggcaaaagatctgattttttagaattaaccttcttttgtgccatgataatgcccaccagaatcataattccgccgaaggtgtgatatatggtccattgttcagataaccagatacttgcaataatggcggtgaacactggcacaagattcataaagatactggttctatttggcccaagttgttgtacggctaacatccaaactagcggcgcaatgagtgaagcaaatacaccggcataaattgcacttggcgcattttgtgcatttaaggcatccagaccaaaccagaaaattaaaggaagatggaacagcacggaaaacccaatctgaacgtataagcttgtcataattggaagtgagagctgccatttctttaagaaaactccataaaatgcatagaagaatacggcaataatcatcaatgcatcgccaaggtgcccgccaccacttaaaagcttattaatatttccttgggacataacgtatagcagaccagcaaaagacaaaatactgccaaaaactgcaaagcgattaggcacatcttttaaaatggcaagcgaaacaaagatcgtaaagatgggaataaatgcattcacaatccccatattggttgcactagtataatgggcagccgtataagccaagccttgataaagcaccatcccaaatgcacttaacacagcaagcttaggtaaatagggtattactagtcgtctttgtctccaaacagacaaaaacataaatggagtcaaaataataaaagcgattaaccaccgataaaagctgatacttaccggagaaatatagtccgagacatagcgggtgactacaatatttaaagaccaaatcagtactgccagaatgggaaaaataaatgcccatttgtgatatttcatgacctgactcatagtaatacaccaactacaaaagagactttattttgaagaatgtcttaataaattgaaatatcgtatttccgacattgatattgaacttaagacatcatttattttttaaaataatgtccaagctttcatggcatgttctaccactttatgtaattgttcggtacttgcaccatctctggcctgaatggtaagcccctgaataacagtcgcataaaaatcagtcatttcttgtagaggggcattagtaggcaaatcgccctgctctacaccttgttcgagacgttttaataatttttctttggtctttattcgcttatctaaaagattttgctgtacctcttgtgtggcatcagaacagttcatagcagcaactaccaacatacaacctgctggcttattaggttgaaccaatcgttttacattgtcataaagatataactcaaaagcaatttttgcagtttttgcttctaaaaatatcgtttcaataggacatgcttcatgagcgagatagtagtcaatacttttgtaaaacaaacctgccttatcgccaaaagcactgtataggctcggcgctgtaatttctaaagcatgtgttaagtcactaatagaggtggcttcatagccatgttcccaaaaaagtaacatagctttctctaacacttgctgctcatcaaagcatttagggcgtccacgcttcttttttaacgtgtcctcattaacaagatctgtttcatgcctatttgtcataaagatcacatctatttttataacaatcgttattaaattaattgacgttcaattttttatcaactattttattttcataatgatcgttagttaattataaatttgcctttcttcacttcgaatttagcaaagtaaggatttctttatggaccaatctactacctctaaagcacgacccatgacttccacacaagggagctggtttgctattttggctgttgccatcgcagcctttgccttggtaacgagtgaatttttacctgttggtgtcttaaatagcgttgcagccgatttacacatttctgtaggtacagcaggtcttattattacagtacccggcattatggcagcgattgcagcccctctattacccgtttcagtaaagcaactcgaccgtcgttatgtgcttattttactgactgctattatggtgattgccaataccattacggcttttgcagaaaactttcatgttttattattgagccgtttgattttagggatttcaattggtggcttctgggcaacagcaattgccttaagcggtaagctcgcacctgcaaatttacctatcgccaaagcaactgctgtagtaatggctggtgtaactttcgccactgtactaggtgtaccgattggaacatggttaagtgagttttatgggtggcgcagtgcctttggaattacagctgctatcggtcttgttgtattagtgcttcagcttattttcttaccaaaacttttaccagagtcagcaatacatattcgtgatttacctgcattattacgcacacctaaagcacgtagcggcatgcttattgttttattaattgggcttgctcacttctgtgcatacagttatttagcccctttctttaaaaatgtagccgggtttaatggcacaactattagctcattattattgctttacggaatagccggtatttttggaaatgcatttgcagggtacagtggtaatttaaatgttcgatataccttagctttcgttggaacatgttttgccattgtattctttggcttcccaatctttgctatccatgagtttggtgccattgtccttacagcattatggggcttcgcatttggtgccttccctacctctgccaatatttggatgtttgtacacgcacctcatgctgtagaaaaaggtatgccgctttttgttggtatgttccaagtcatgattgctacaggatcattattaggtggttatgtagttgatcattttaatgaaaatactttaatttatggggtattaagcttcgttgccttagctttaattagtacatttaccttagccaaaggtttaaacaatcccaaagcaacatgtgaaaattagaatattacttagagtagacccatgaaaaatgaggaccaacaattttctttattagagagtatagaagttcatgaatttctatacgaaaaagaagatattgttcgtcctcatgcttcactatggggagattttaattttagtttaaatggtattttagaaatacaggtagaagagcaaatatacttgtctcctccaagctatgggctttggattccccctcaaacggttcatcaatctacccatatcgatcatgaaattcattatatctgcattcgtttacaccctcggctttgctctattttaggagatatctgccgatgctttagtattcagcccttctttcgaaccttagttttacaaatattggaacagcaaaaacaaacggaaaagcctgaatatttagaacatcttttacaggttttattcgatcaattacaacaagcacccgcctattctcattatttaccacaaacaaggcatcctgttttactgccaattttagaaaagctttcagacccattactttttaatctctctttacagcagctacttcagaacttttctgtcagtgatcgtcatttattacgcttaagccaacaagaactacaactttcactatccgaatggcgtaatcgagccaaaattgtttacgccattcatcagatccgtcaaggaacaccgattaaacgcctagcatacgatttaggttatcaacacagctcaagttttatcgaattttttaaaagatatacaggccaaacacctgttcaaatcagaaataattagatagtaaaactgcttttgtatatctttttattttttgaacacgaatattattgcactactcaagaatagcagttaaaacaaatgcgttacttgatatcaattacaatcttcaggaaagactcatgactcaatctgtatatcatattccagtaaaagctatttcaggcgaaacggttgaccttgaccaatataaagggaaagttttattaatcgtaaacacagcgtctaaatgtggtttaactccacaatacgaaggcttagaaaagctgtatcaagcaaagaaagatcaaggtcttgaaatcttaggcttccctgcaaacaactttaaagaacaagaacctggttcggatgaagaaattcaacagttctgctcattaaactacgatgttcatttcccacttttctctaaaatctctgtagctggcgaagataaacatccactttatcaagcgctaacaacagctcaaccagaacgtattggagaaggccctttccgtgagcgcttagaaggtttaggtattcctactaaccctgcccctgaagtgttatggaatttcgagaaattcctagtaaataaaaacggtgaagttgttgcgcgttttgcacctaacttaacagcagacgatgaacaaattgtaaaagcagttgaagcagaattagctaaataatttttgcatcaaactaataaaaggagcgctatagcactcctttttattgtctactcaaaatgttgttcatttgcaacaataccttatttctacatattttatgcatatagtacctacttgcttcagttggtattgtttgtagttatgaaaaaagttttacaaggtgcatttttcccatttgtgatttttgcttcaggtatgttgttacttggatgtgatcagacacaagaccacgcaaaggaacaagaatccgttcagactaacgatcaaatatcagaccaagctgatgactctcaacaagaaatcacagctacacaaaataaaactgaattaaaaaatggtaatgttttttatatcgttcgtgatgccgctaatttacagttaaaggctggcgactatatcgaaaagctcaaggacactcaacttgacgttgaacaagctattcaagataaagatcagcatgagctaaaaacaactgtgacgactttgaaagcacagttagaaggtttaaaccaagctttgcttggtttagatatcagaagtcaggaagttgaaaatatccgtcaaagcctactacaggcaaaccagcaagctttaagcatgcctttattaaatgggaaattagagcaaattaatttcgaccaaattgaaaagcaacttaataccatccaaatggatatggtcaagctcgctgctatgattatggcaggagatgaaaaatcagattcaaaaactgattcttaattttctttttagcaataaaaaaagccacctttcggtggctttttcaatctcgaaccgcgtcttattgagcgcggtttttgattttacggatagtttcaagctgtgcagcggtttctgccaaggcagccaacgcagcagctgagtccaaatcactcttttggtttgcaagcaattgttcagcatttttacgtgcctctaaaattgcagcttcatccaaattgtcagcacggattgcagtatctgcaagaaccgtcacaacatgaggttgaacttctaaaacaccgccagatacatagacgatttcttctgtaccattttccaacagaacacgaatcgggcccggttgaagcaaggttacaagtggagcatgccctggcaaaataccaagttcaccacctgcacctttcgcgattaacatcgtcactgcgccagagtaaattgactctttaacacttacgacatcacattgcatagtcgccatgagatgatctccttaaattagagtttctcagctttagcaatcacttcgtcaataccaccaaccatatagaacgcttgttctgggatgtgatcgtattcaccagctaatagacctttaaagccacgaatcgtttctttaagtggtactaatttaccaggagcaccagtaaatacttcagctacgtggaatggttgagagaagaaacgttggattttacgcgcacggtaaacaaccaatttatcttcttctgccaattcatccatacccaagattgcgatgatgtctttaagctctttatagcgttgcaatacgttttgtactgcgcgcgcaatttcatagtgctcttgaccaacaactaatgggtctaactgacgtgaagttgagtcaagtggatcgatcgctggatagataccagaagatgcgatgtcacggctcaatactactgttgcgtctaagtgagcaaatgtagttgcaggcgatgggtctgttaagtcatcggcaggtacatatactgcttggatcgaagtgatcgaaccagatttagtagatgtaatacgctcttgaagaacacccatttcttctgcaagtgtaggttggtaacctaccgcagatggcatacgacctaacaatgctgatacttcagtacctgcaagtgtataacggtagatgttgtcgacgaataataatacgtcacgacctttaccgttttcgtctttttcatcacggaagtattcagccatagtcaaaccagttaacgctacgcgtaaacggttacctggtggctcgttcatctgaccgtagaccattgctactttgtcaagaacgttagaatctttcatttcgtgatagaagtcattaccttcacgagtacgctcaccaacaccagcaaacacagataaacctgagtgtgctttcgcgatgttgttgatcaattccatcatgttaacggttttaccaacaccagcaccaccgaataaaccaactttaccacctttcgcaaacgggcaaagtaagtcaattactttaataccagtttctaaaaggtcagtagaagctgcttgttcagcataagaaggcgcttgacggtgaatcggcaaacgttcttcagtcgcaacaggacctgcttcatcgataggacgacctaaaacgtccatgatacggccaagagtggctgtaccaactggaacagagatcggtgcgtttgtgctagttacagtaagaccacgtttaagaccttctgtagaacccattgcgatggtacgaacaacaccatcaccaagttgttgctgaacttctaaagtagtttcagtaccgtcaacttggagagcgtcatagatctttggaacgcttgtgcgctcaaactcgacgtcgataaccgcgccgatgatctgaatgatacgaccgctactcattgctgtctcctcaattcaaacttaataatgttaaacggcagcggcaccaccaacgatctcagagatttcctgagtaatcgcggcttgacgcagcttgttatagatgagttgtaagtctttgataagctgacctgcgttatctgtcgctgctttcattgcgaccatacgtgcagattgctcacatgcgacgttttcaatcacaccttgataaaccatagactcgatatagcgaactaataaaccatttagcaattcttctgcttctggttcatagatgtaatcccaaccataagtacggttgaggtcatcgccttcttctgctggtgctaaaggaacaagttgctcaactttaggcttttgtgtcattgcattgacgaaaccatttgatacgagatagatacgatctaattcgcctttatcaaatgcatcaagcataacttgcactgagccagttaactgttccaaactaggggcatcaccaatttgagtggttgcacccagcactttaccgccgtaattcttaaaaaacgaaaccgctttttgaccaatcaaagcaaattgaacttcaattgactgctcttgttgtgctttgacatgctgcacaactttcttgaacaagttaatgttcaaaccacctgccaaaccgcgatctgaagatacaatgatgtaaccaacacgcttaactgggcggtccaccatataacggtgtttgtattcagggtttgcttgtaccaagtgagcaattacacggcgcatattatcggcatacggacggccctgagccatgcgctcttgcgcacgacgcatttttgaagcagctaccatttgcatcgcgcgagtaatcttttgcgtgctcttgatactagctactttggcgcgaatttcttttaaatttgccatacgcttaacctagtattcgaaagccctttcgagcttccgaaggttgatccgtgaaccaaacttaactaaaactgaacttagtaagtttgagtcgctttaaagctttcaataccagctttgattgctgcttcgatgtctttgttgtagtcaccagtttcatcgatttgtttcatcaacggagcatattctgaacggaagtaagcaattaacgcagcatcaaagtctacgattttcttaacttctacgtcagccatatagccttcgttagatgcataaacagaaacagcttggtcagcaattgagtaaggagcatattgtttttgcttcattaactcagttacacgttgaccatgttcaagttgtttacgagttgcttcatcaaggtcagaagcaaactgagcaaacgcagccaattcacggtattgcgctaaagcggtacggataccaccagacaattttttgatgatcttagtttgagcagaaccaccaacacgagatacagagatacccgcgttcacagcaggacggatacctgcattgaataatgatgtttctaagaagatctgaccgtcagtaatcgaaattacgtttgttggtacgaatgcagatacgtcacctgcttgagtttcaataattggcaatgcagttaaagaaccagttttaccagttactgcgccattagtgaatttctcaacgtattcagcagatacacgtgaagcacgttcaagaagacgtgagtgaagatagaatacgtcacctggatacgcttcacgacctggtggacgacgtaaaagcaatgaaatttgacggtaagcaacagcttgcttagacaaatcatcataaatgataagagcatcttcaccgcggtcacggaagtattcacccattgtacagccagagtacggagctaaatactgcattgcagcaggatcagcagccgcagcagcgacaacagttgtatacgccatagcgccagtttcttctagcttacgtacaacgtttgcaattgttgattgtttttgaccaatcgcaacgtatacacatttaatgccagagtttttctgagcgataatcgcatcgatcgccattgctgttttaccagtttgacggtcaccaataatcaactcacgctgaccacgacccacaggaatcatggtatcaactgatttataaccagtttgaacaggttggtctacagattgacgccaaattacacctggtgctactttttcaacagcatcagttaattttgcatcaattgggcctttaccatcaattgggttacccaaagcatctacgacacggccaagaagttcaggaccaactggaacttctaaaacacgacctgtacaacgagctttttgaccttcttgaaggcttaggtagttacctaaaacaacggcacccactgaatcctgttctaggttcagtgccataccaaataagccgccgtcgaattcgatcatttcaccgtacattgcatcagcaagaccgtgaatacgcacgataccgtcggataccataacaatggtaccttcgtttttagcggtcgcgctggtgtccagatctccgatacgctgtttaatgagcgcactgatctcggatggattcagttgttgcattgcgctattcctcaatcttttattagttcagtcttcatcatttgcattatgcaagaagacgagtacgcattttttcaagcttgttaagcgcagaatcatctatcacttgatcgcctgcacgaattacaacacctgcaataagctcaggtttaacttcaactgaaacagttactgtgctgttaaaacgcttttctaaagcagatttcaacagttgctcttgttcagcagttaacgggaaagccgattcaatcacgacatccacattgttgttattctgtgatttaagctgttcatattctgctgcaatttcaggtaacaacactaatcgatcgttatctgcaagaagtgtcaaaaagttagacactgcttgagactgatcttcacctaaaactttagcaaaaagcttcacttgctccgcaggagtaagttcagggcgatttaaataagcggaaaatgcttcgtcttgcaccgcagcactgagcacttgtaacgcattcgaccaattgtctgttgcaccttgctcagaagcataagcaaatgctgctttggcatacggacgtgccaacgtcaagagttcagccataattcgcctcgcttaaagtttagcagccagctgagacagcatggcgttatgagcttctgcatcaacttgttggttcaggatcttttctgcaccagttactgccaaggcagctacttgttgacgtaattcttcgcgagcagaattgatttcttgatcaacagcttctttagcctgttgacgaatacgctcaccttcagccgcagcttgagtacgagcttcttcgatcaattgcgctgcacgacggttcgcttgttcgatcaattgagccgcttgtgctttagccgcatcaagctcttgctttacttgcgcttgtgcatcggcaaggtcagctttcgctttttctgctgcatttaagccatcagcgattttgcgctgacgctcactaatcgcattgattagtggtggccaaacaaacttcatgcagaatgcgacaaaaaacgcaaacgcaatcgcttgaccaatcaatgtgaggttgatattcattgcaattcctcaaatagtggatttaggaattaagctgattaacctacaaatggattagcgaagatgaagaacaagccaataccaacaccgatcataggcacagcatcaagaagacccgcgattaagaacatacgagtttgaagttgtggagctaattctggttgacgagcaacagcttctaaaaagcgaccacccaaaagaccaaaaccaatcgcagtacccaaagcaccgaaagcgatcaagatagcagatgcaattgcaactagacctaaagtgagttccatgaaaaattcctcagaggttaggttattaccaaattaaattaaaaaaattcagcccaaccatcgtttgacagttaggcaataccattaatgtttttcgcttgccatgctcaagtaaacgatggtaagcatcataaagatgaatgcctgcaacgtgattacaagaatgtggaagatcgcccaaggcacagataacgcccattgaatccagaacggcaataatgcgatcaggataaagatcaactcaccggcatacatgttaccgaatagtcggagagccaatgaaataggacgagcaaggaatgttaccaattccaaaatcaagttcactggaataagcaacgcttttgcaactggattacttgggttaaatgggttaagtgccaactcgcctacgaaaccgccaacacccttttcgcggatgctgtagaacaagataagtacaaacacagataaagacataccaagggtaatgtttggatctgtagatggaacgatcttgaagtaaacgtggtgagggtccataccaaatacgttagcacccacaaatgcagcaacttgaggaatccagtcaactgggatcaagtccattaagttcatgaggaaaatccacacgaaaatagtgagtgcaagtggagcgattaaacgtgatttgccatgaaaagtatcacggacacttgagtcaacaaactcaatgatcatttcaattgcagattggaattttgttggaacgccagcatttgcagctctcgcaactatccaaaataacaaacagaaaatcacaccaaggccaattgaccaacccattgaatccaagtgaattgcagtgaaccccatcgaatgagcttcttcagcagtctcagccaatttccatgtaccatctggcattttgccataggtcatattggtcaagtgatgcttgatatactctgtcgaagtgagggcatgttcttcagcagccataaatcacacctggtcaatgtcaattactaaaaagaagggaaacgaacatcggcgtactgtcgatatctcgccaccctccaaaaaatcttcaattcttcttgtttctatacccgtttttgtagacgtgacacccaaaaaggagcaacccacgacatcgcttgaacgagaataaaaccaaacagcaatgctaacggtgataaaggtttaacattgctcaaaatcaaaataaatccaacgatcatgattgcaaatttgcctaacatgcccctatacatgttagacagcacttgtttagatgctctcgcacctgcagttctgaaggattgccacgcaaaatagctcgtagcaagccagcagaccaatgcaccaagtgccgcacttaatgctgctgtcatgtcttttatgctccacgccacaagtgcggaaacagggatcatgcatgcttgtaagaagaccaaagcttttgctaatcgtcggtcaatcaagcgactagtttggctcatttttatccactcacagcataaatgcttgacaagtttagctgatgatcgcttttaatcgcaggcattatagagttacacccctgaacatgcaatcttttcccgactttagtcggggtttttcgtgacaggtggtgctgacgctacagtcagcctttgtttactttttatctcacttttgcgtatttaatacacatttatcggtttttatcgccagtttcttccatgctgttacaaaattatcttcattattcatactttcatcaacgggttggaaggtaatactacccagtttttgatattgcccttttgttgtaaaactttcagcaagtaaacacatctgagcttttggtcgactatcattaaggtactttatttgtgccgctgtaggagctacatgcggatcatccgttaaggcacccgcaaactttaagtttagcgaacgctccaaatattgataagcatcatgataagaccaatacggtttaccgttgcttgagctatcgtaagcttgagccgcctgcaacatatttcgtgcaaatgtattcgcattattccaatacttcgctttgttttcaggatgctgttgtgatcgtaaagctgcaataaaaaagccaatacgtactgcattgtttggttctaaccaaacatgcgtatccacagtatttggtaaagcagccccacgtgtattgcgctgcggcaaaatagaaagaataccgctatctaacaaagcaattgctttcttattgttacttagtaatttgttgagcggagcttcatgagcttttcctaaccagatcactaaagaagcatcattaattgctttacggtgtgccggtgttaactgtacatcatgcccactttgcccttgaagcaataactggggttcttcaactcctttggtaatttcttttgcaatcaaatagattgggtgcgtagagacaaccaaaccctgactccaacctaacgtactcataagagagaacagactgaaaacaaaaacgcggaacatgacagaccatcaattagtaatagctcgaagcatgttataatataacaaagttacaaaaatacctaagattaatcgaatgaagcaccgcttcatgctaatattccattaaaaatttgaggttatgtctatgagttcttgcatgcatgaacatcatgattctttgcatggtgtacatgatcaccataatgtcgcaagtcgtttagctgaagcagaaactttatgtactgcggtcggtgcacgccttacgcctttgcgtaaagaagttcttgaactcattttaaatgcttcaggtcctatgggtgcctatgacttattagcacgtattaaaagtcaaacagatcgccctgccgcccctcctactgtttatagaactttagactttttattagaaaagggtcttattcatcgcttaacatctattaatgcttatataccatgctgtcacccacgtgaaggtcatcaggctgcattcctgatttgtaccgaatgtcacacggttaaagaagcatcttcacaaggtctaacccaacaacttgaccaacttgcagctttagatgatttcgcagcacaacacagcattatagaaatttcggggaaatgccagcagtgccgcacagctcgctaaatcctgtattgattcaacttgaacaggtctctgttcatcgtgatcagcgggatatattaaaaaaagttgattttgctctgcatgaaaatgaaattgtgaccttaattggtcccaatggcgcaggtaaatcaactttaattaaagttctacttggtattttaaagccaagtagtggacgcgtcataagcaataaaaaactaaaaatggcttatgtgcctcagaaatttaatccatctcatagtcttcctttacgggtacaagatttattagatcttgaaaagtgtagccctgcccttcgtcaggaaattattcaagacaccggtattgccaaactacaacaatcaaaagttcagcaactttctggtggagagcgccaacgtgtactgctcgcacgtgctttacttagaaagccagatatcctcgttcttgatgaacccatgcaaggcttagatattcaatcagaagctgagctttatgaatatgtacgtagtctgccggagcgttatggttgtgccattttaattgtttcccatgatttacagtgggtcatgcagggaactcaacgcgttgtctgtttaaacaagcatatatgctgtagcggcttaccagaaagtattcagcagcatcctgaataccaagcaatattcggtactcagcgagttttctatcaacatcatcatgatcactgtgcgcatggtgacgctgcacacccctgccctcacaatagcagacctcacattcacccggaaccggaagcttaaaccatgatggaatggttacaattattgttacccgcatggattatgggaaccttattagtctttttgactgcaccacttggttgtctcatgctatggagacgtatgtctttttttgcagacaccatggcacatggaaccttacttggtgtagcaattgctggtgctttaagccttcctctctggcttggcgtagcaggtactgcaattttattagtcgctattttgtgggcactacatgacaatcgtttaccaaacgatgctttgcttgccctatgctcagcaacattactatgtagtggcctcctgtttattcaacatgttccaagtttaagaccggagcttttaagttatttgtttggtgacttactaagtattgattggccagacctacctgttttcacattaattattgcagtatcactggcaattctttatcgcttttggcagcctcaaattcaaattgccattgatccggatattgcaattagtgaaggtgtgaatgcgaaatggcaacgtctcatttttatgttattgctagccttatttacagtactagctttacgtgcagtaggttcacttttaatgggggcactactggttattccagcattgagcgctcgattactcgctcactcaccaaagcagatggttatttgggcctttgttttagctcaactcggtgtcagtgttggcctatggtcaagcgcagcacttaatatctcgactggcctcagtattgttttatgtatggcgttgagttttgcacttatctttatgcttcaaaaaatcaaaaatcaaactcaagcggcctaaatcaggctgcttgatggaccgtacttagcaataacgctgcacaactaaacatgacagcaaaaccacggttcaaatatttttgttgcttaggagaacgtagcaatcttaaaacttttgaagctagccctgtataaccagccattacaatcaaatcaatcgtaaccatagtagctgccataatcaggtattgtatccattgaggtttgcttaaatctaagaactgaggcaaaactgccaatagaaatacgatggctttaggattactgatattgaccacaaatccatttaacagcagagcagaaacagatttatcctttttttcgtgttgaatttctatgtcttttacaggtgctgtccactgtaaataagctaaatacaataaataggctaccccgaaccacttaacggcttgaaaagccaacggggtcgttgcgaatagaacacctacacccgcagctacaatcatgatttgaattaacaaggcgatttgcaaaccgatcgcattccaatagccatgtctaaagccataatttaagccgctcgacatagaagcaatagcccctgctcccggagaaatactaatgacccaacaggccaacatataagcaaaccaaacttgcaaagacatagcgaaaatagacaataaaagtgaaattataccgttttataaaactatcgtggcgataattcaaacaataaaatcaataaatagactactaacggctcttcgcatcaggcacaataattgaagctcatactaaattataattgaggagagatcttctaatgactgctcaatctgtcattttgccattaccatcagatcatgcccgttttattgttcttcgtttaaaagatttaacaattgctgaattaaaagaacaactcgaagctttattcgaaacacgtgaccgtctcattactcaacattcagacgcacaaattaaaacagcagtcgcttttggtccagaactttggaagcagctttacagccaatctcctgctggttttaaacaacttgaaccagaaaatggcgcattcaatatgccagtcgtaccagctgatgtgcttattcacattgccagtatgcgttctgatatctgttttgctttaagccaagcattttttgaagggattaaagataaagttgaagttctggatgagcgtgtatgcttccgttatttcgatggtcgcgatattactggctttatagatggtactgaaaaccctcaacttccagatgaccgcgcagaaactgctctcctcccagaaagtgctggagtatttgcagatggtagtttcatatttgcgcagcgctatgcacatgacttggaaaaatggaaaaaacttaaagtcgatgcacaagaaaatgtcatgggccgtaccaagcttgaatctattgaattagatgatgatgttaaaccggaaaatgcccatgtcgctcgtactgtcgttgaagatgaggaaggcgaagaaatggaaatcctacgtcacagcttaccttatggtgacggtcgaggtgatcaaggtttattcttcattgcttacactaaagacctgagcattattgatgcgatgttaaagcgcatgtttggtacaagtggggatggcattcatgaccgcttactgcacttcgtgacaccacttgacggggcatattactttgcaccaagtgaagaattattagaagaaattttagaggcttaaaagaaaaaaagaggagcttaagctcctcttttcacattctcattcttagaaaggaatacgtttatatttacggtattctggtttccagaacgattgatcaatcttctgcttaagcaaatcatcactaatagttacagccacaccatctgccattgcagcttttgccacttcaaatgcaatcactttagacacttgttgaatttcacctaaaggtggcaataaatcagcttgtggatctttcagcaacggtgaacagtctgctaaagcactacttgatgccatgagcatgttttctgtaacgcgtttagcgcctgatgctactacacctaaaccaataccagggaagatatatgagttgttgcactgcgaaatattataaagcttgccgtgatgatttacaggtgcaaatgggctacccgttgcaattaatgctttaccttcagtccattccacaatatccgccggtactgcttctacacgcgaagtcgggttagataacggcatcacaattggtcgttcacaattggcagccatggtcttaatgatttcttcagtaaataggcccggctgaccagaaacaccgattaatactgtaggcttggcatttttaacaacatcaagcagtgaaatcacttcttcaatattgccccattggtctactacttcagctttttgagctaacttacgttggaagtctaataggtttggctgattttcagtgatcaaaccaaaacgatctaccatgtaaacacgagcacgtgcttcagcatcggttagaccttctgaaaccatttgtgcaacgatttgctctgcaataccacaaccagctgaacctgcacctaagaaagcaattgtttggtcttttaattgtttacctgctgcacggcttgcagcaattaaactaccaacagaaaccgctgctgttccttgaatatcatcattgaaacaacaaattttatcgcgatatttttctaaaagtggcatcgcatttttttgtgcgaaatcttcaaactggatgagtgcttttggccagcgacgttttacagcttcaatcaccatatctacaaagtcataatactcatcaccactaatacgtggttgacgccatcccatgtagatcgggtcatttaataattgagggttattcgtccctacatcaattgtgattggcaatgtgtaagcagggctaataccaccacatgcggtatacagcgaaagtttcccaattggaatacccatgccgccaataccttggtcaccaagacctaaaatacgttcaccatctgtaatcacaatgactttgacattatttttattaacgttttgcaaaatatcatcaatcacatcacgatctggatatgaaatgaaaacaccacgatgacggcgatagatatcagagaaacgttgacatgcctcacccacagttggcgtgtaaataattggcatcatctcttcaagatgattttcaattaagtggtagaacagagtttcgttggtatcttggatattacgtaaatagatgtgcttattaatatcatcattgaaagcacaatactgctgataagagcgttggctttgctcttcgatagtttcaataatatgtggaagtaacccgtgtaagttaaagttacttctttcttcttgagtgaaagcggaccctttattcaaaaggggtaactctaaaagtgtatagcctgcataagggatataaaggggatgtttacttgggtgacctgatatcattgcctatctcattttccagcttagaactcagaaaagtacagtttcagcactctctaaagctcgttgtatgcgtaagcttaagactatttaatacaaaataggtattttaaactgtgatattgaaattgaatactatttagaaaaaacatataacaaaattaatattaaaaattaattacttacatttttcatctttttttaaattattctttcttaactctatatctgacttagaatcttatatttttaccctgtcttacatttccataaaaaataccaagtgttttactatcttataatttcaaaaatattacctaaaaagcctgtatttacgtatttttagaatttaatcatgttcattttttaatatttacaaaaaaaatagttctcggaaacttcaagaaagaaattaaatgaaagcgttaaatgcactcccctaactcataggaaatttgctatatttgacgtttttctgcgacatctattttcgattgatatgaatacggcaatacaagcagctctcgaccatgcagtgcaaacccttcagcaagaaggtgtgcttccttcggattggaataattcaagcaatttaacgcgcaccaaagaccgaagccatggcgactttgcttctaatattgccatgatcggctctaaagccgctggtatgaaaccacgcgatttagctgagaaaattctcgcagcgctaccagaagttgcagacatcagcaaagctgaaatcgcaggtcctggttttatcaatttctttttaaatgcagatcaacgttttgcaattcttgaccagattcaggctcaaaaagaaagctttggtcgtagccaatcaaatgcagctaaaaagattcaagttgaattcgtttctgcaaacccgacgtctagcctacacgtaggtcatggccgcggggctgcttatggtatgactgttgcaaacttgcttgaagcgacaggtgctaaagttgatcgcgaatattatgtaaatgatgctggccgtcaaatggatattttggcgacttctacttatttacgttatttggaattacttggacaaaaccttgtattccctaaaaatgcatatcaaggcgattacgttaaagaaatcgcacaaggcatcattgataaagatggcgatgcttacgttcgtgaagttgcgaatgtttataaagatgtaccagaagacgtgcaatatgctgaagagctagatagcgaaggcaacaaagtcgtattatctggcgacaaagaaaaacacattgacggtcttattgccaattcacaacaattattaggtgaaggctaccgagtattccatcaagccgcactccatgccattttagatgatattaaagatgaccttgctgacttcggcgtaacctttaaccaatggtttagtgaagcatctcttagcgcaaaaattgacgaagcgttagaaacacttgatcaacgcggcttcttatatgaaaaagatggcaacatctggtttaaatcgactgaatttggtgatgaaaaagaccgtgttgtgaagcgccgtaatggtcaaacaacttactttgcatctgacattgcatatcacttaaataaactacaacgtggttatactgaccttgttgatatttggggttctgaccaccacggttatatctctcgcgtaaaagctgcgattgatgcaatgggttatgactcgaaaaaattaactgttcttttagttcagttcgtaagcttatggcgcggtggtgagatggttcaaatgtcatctcgttcaggtcagttcgtgactttacgtgacttgcgtaaagaagtcggcaatgatgcagctcgtttctactacgtgatgcgtaaaagtgaacaacacattgactttgaccttgaccttgctgtttcacaaagtaaagacaatgcggtgtattatattcaatacgctcatgcacgtatttgccgtatgctagaaaaagcagcaagcactggcttacaatttgaagtaagtgctgctcgttcacatgctgcacgtttatcacttgatgcagaaactgaaattcttgctaaactggctgcatatccagacgttgtgttacgtgctgctaatgcatatgaaccacaccaagtaggtaactacttaaaagaattagctgcgctattccacggttggtacaatgaacacaaagttttaagtgatgatgctgaacttacacaagcgcgcttattactttcaatcaatgtacagcaagtattgcgcaatggcttagaattactcggtgtttctgcacctgaagccatgtaagttagtgttggggtgtttggtcaaagccatataccccttcatgttgtaagaaataatgctttgcaaggaaatctatctatgcgaagcgatgttttaaagtaaacgagaactaaactcgaaataaaacaatcaaaatacagaggaataatccacgtgtttggcaaaacgcaacgcggtgtatctgaaagacctaacaagcctaaaaagcctttaattcctaaatggttagggacacttgtcgctattttagcggtcttatgtatcgcagtaatgctcatgctttggaaaccgtggcaacctgtttcttcaaaaaaccagattacttctgagcactataaagaagaagaaaccaataaagattaccgcttttatgatctattgcctcaacagcaggtcactcctattccggaacaggcaattccagaaagtaaaaatcagggtactgccatgattgtagaagctcctagtacagctcaacctgccgcttctgaacctgcaagtgtaagcactgacgacacgactgactcaacagctgctatacctcaacaaccaaattatattttacaagttcgaagctatactgaccccgatcaagcagatgctcgacgtgcagaaatcattttaaatggcttatcggctgatgtaattaaaagctctgagaatggaaaaacttggtatcgtgttatttctggtccatatgacactcaagaagctgctctcgctgctcaacaaacattgcagcatagcggtattgactctattgtgattaaacgcagataaagattaagcaataaaaaaggaacaaatatttgttccttttcttttatatatcagcacaatttctttcgtttgaccctaaacctttctgtctcgctttttgaaaagctggtctttgctgaatccgatgtaagaatgcttgaatatgcggatatttaccttgaagacgtgactgtagagcctctagtggaaaactcatttgaatatctgcaaatgaaaaatcccctgcaaaatattcatgctcagccaaataattttctaaaaaactaatatggtctttcatacgtggacgaacaaaatttgctttaaccccttctgtaattttctttgccacaggctgaattagccaaggtacatgtttattgacgttgttcatgaccaaagtcatcactaataacggcataagtgagccttcggcatagtgcatccagtaaatatactgctgtaaatcctgagcttgcttaggtttaaactgctgcttttgatcatatcgctgctgcaaatactctaaaataacagccgattctgcgataacctgctcatcatctgtcaaaataggtgccttgccgagcggatgaatacatttcaatgtttctggtgctgaatagttcggaagacgctgataaaaatgaatatcataatccaagcctaactcttctaaagcccataaaatccgaaacgatcgcgaacattccaggtggtgtacactaatcatggtattgcctacttttatttttcttttttacataaaaaacagcatgtgaacatgctgttttattccatttgtgggatggatataaatcatccaccgcaacaaaatagcatttttatgctgtaacaagcacagtatgaatgtctaaactacgtaacaaagttttagtgactggggttttactgcatatggttaagattttttgctgaagttcttcgtttggaagttctttaaaaacaatacgacgctcgatatgttcttcatgctctcgattggtatgaaaatcaatttcaaccgagtattcaccaaaatcataacccttatgttttgcatacattcttaaagtaataagtgtacatgctgccagacttccggtaagcaaatcataaggtgcaggcccttgatcatgcccttctagcttttcaggctcatcacaaaagtattgatgacggccgctggtaatttcacctttccattgttctgcaagaggctttgctttactgctcgcaattactgctgtcattttgatgctctcatttgatctggaagaactggtgcttctaagcgggcacccacataatctggaatttcaccaaaacgcacgtcatgattaacccattgctcacgtgcttcttttaaatcgtccatcgtacgtgcaacgaaattccaccataataagatcggagtttcaaaaggttcaccaccgattaatagcacacggttccctttctttacttcaatctcaatttcgttcaaacctgtatctaatacaaccatattgtcagcagtaagttcatggccattcacatgagctacgccatctaatgccataaaaccatattcaaattcaggatttagtggaatacgtgtcttagtatcctgggtagcaatgagatcaacccctaataacggtgtatgaaccacaactggagaagtcgtctctaaatattcacccactagtacagtaaattccagaccgtctttttcaacaacaggaagatcgggataatgttcaaatttcggatccatgttgcgcttatggtccggtaaggcgatccagagctgcgcagcatgcatttgagtttcagtatcaggtgcaacctcggtatgagaaataccatgtcctgctgtcatcaaatttacctgtttagggcgaattaattgctttgaccctaaactatcggtatgcatcatggtcccttcaatcatccaagtgaaggtttgcaaaccaatatgtggatgaggtcctacatctaaaccattgccggcaggaaacgttactggtcctgcatgatctaaaaagcaccatgccccaatcattcttttttgtcgactaggtaaagcccgcttaatcaccgtcccctgtccaatttcggcagagcgaattggaaattcctgaataaattgattggcaaatttttcgcaatcctttgaatccgaaatatcgtaatcgttattattgctcatgatattactctcttttacctatgcttttgcaatgagtcgttatactgatcttaacaatacactcattattcaatatagtcttttagtaatacacagggtgctatgaatgagacaatcaatttttaataatcgaaaatctaaaaggatatggccaacttaaggtgattgggtcttaacttgttgttttaaatttttcataaattgtccaaactgtggcaagaattcttgaaacaatggatggtctcgattctctaacatgacttcactaaataactttagaccgactgcaaaagactttgtggtttgatcatcaaaaaattctgctttctttaacttttcaacaatctcgaaaatatcgtcatgattacctgtatagaactcgagccgttccgtataggtagaaacttcgcctttggcatcttttaaatgttgtaccgtaacgtgatattgatgctgtttcatacataaactctctattaaagttgatagtttttagataatttcaacctgtttaaggcccatttatagacgcccaatcgcaacagcagcctgatcaattttttcagcaatttgatagatctgctcttgcttcaactcagtggtattcaatttcaaacgtaaagccgtctttaagttttccatggcacggtgaatttcgattaattgatcattactgtgaatttcacgtctcaaacgcaatttctctaacaacccacttagcttgtcttggtgttcatttaaataagcttccccaaattccgtaatttgatattgtttacgctctacatctagcaagttaatgaggttcatttcttccaggctggttaaagtcggatagattgttcctgcacttggcgtatagccatcgcctaccaaatcacttatttctttaataatttcataaccatgcttagggctttgctgaataagatgaaggactaaaagtttcatacgtccagcttcaaaaagtctcccacgacgccccgaacggtgatggccgtgatgatggtcattatgttcagcatgatgatgttctgattgttgtctcatctttggaagttctctgatatacccaacttataaccattaagatatatcttaatgtatcttatatcaagaaaaagtaataaaagccaatctattaatttgataattattaaaattaatattattttctttaaatgctaagtaataaaaaaagattgcttaagcactcttatatacccgtatgtttagtaaagtcggtaaaaaagccagaatctaaaaaattattatgcgatcaaatttcttttctgctcaaactgctcttcaatttttgaactcagaaaattaacaataggctgcaaagcataatgttcctcttgccaattttgtttgcctatttcccctctatattcctgtataagccgctgcaatacgaatttctgctcaggaggaagctgaggcataacccatcgagctgcattgtcttttgaagcaatatccttcatgactaaactaaaatagatccggcataaagctaaaatctggtttctttcatctgcatcctcatcccaatgagctacaatttcgggataagtatcagacattgcttgccatagttcttgatcagaaatttcaggtgcccattggtccaaagctggaccaaataaaactgtatgatgaaatctcgcttttctaagcaatatactaatatctgggtctttctgggaacttaatgttccaccttctttaagttcttcacgtagccattcaccaaactgcatttcataacttaaaggataatttccagactgaatctcatcttttaataaaatagtaacttctaatggtctttgtaattccccaacaggctgtgaaatttttagtaattcttgtgcaagctgctcgcgtaaagcagatgttaatggttgagtaaccacgaccagaacatcaaggtcactttctggtcctaaaccaccatcaacagctgaaccataaagatagattgcaaataatgatttcgctaaaagttgctgtaatttttcttgtagatattctaactgaatgaaatcagacatctctcacctccttcggaagaaacagatataaaaaaggcaggatttaatcctgccttttcatttgattattcccactcaatcgttgctggtggtttagatgacacgtcgtataccacacgtgatacatctttaatttcgttcataatgcgtgttgagattttatcaaccaattcgtatggtaaatgtgcaaaacgagctgtcataaagtcaactgtttcaactgcacgaagcgcaatcacccatgcatagcgacggccatcaccgactacacctactgatttaacaggttggaatacagcaaatgcttgagctgttttgtcataccagccgctgtcacgaagctcttgcataaagatatcatcagcaagacgaagaatatctgcatattcttttttcacttcacccaaaatacgaacgcctaaacctgggcccgggaatggatgacggtagatcatgctatgtggcaagccaagtgtagtacctaatttacgtacttcatctttaaacaaatcacgtaaaggctcaaccaattcaaatgctaaatcgtctggtaaaccacccacattgtggtgagatttaataacgtgtgctttaccttgtttgcttgcagcagattcaattacgtctgggtaaattgtaccttgcgccaagaatttcacgccatcaagtttacgtgcttcttcagcaaatacttcaataaactcacgaccaataattttacgctttgcttcaggatcggtaacgccagctagggcatttaagaagcgcgcctctgcatctgcacgaataacacgaatacccatgttttcagcaaacatttgcatcacttggtcaccttcgtttaaacgaagtaaaccattatcaacaaatacacatgttaattggtcaccaatcgctttgtgtaaaagcgcagcaacaacagatgagtcaacaccaccagaaagacctaaaagtactttctcattaccaatttgctcacgtaactgctctacacgcaaatcgatgatgtgttcaggtgtccaaaggccaccacatccacaaattttgtgaacgaaattagaaagtagctcttcaccttttgccgtgtgtgttacttctgggtggaactgaacaccgtaaaaacggcgtgtttcatcacttacagcagcaactggacagcttggtgtgcttgcagtaatcgtaaaaccttctggaatctggctcactttgtcgccgtggctcatccaaacgtgtagttggttttcgcggtcttgtaagttgccaataagttggtcacgtttaacgatatcaacttcggcataaccaaactcatgtacagtacccggctcaactttaccgcctaactgttcagacatggtttgtaaaccatagcaaatacccaatactggaacgcctaattcaaacaccacttgcggtgcgcgagggctgccctcttcatgcacactctcaggtccacctgataaaatgataccgtttggcttaaaagcacgaatgtcttcttcagacatatcaaaggcatacatttcagagtaaacaccagcttcacgtacacgacgtgcaatgagctgactatattgagagccgaaatccaggatcaggatacgatcttcagtaatttgagtattggtagtcatgacaaaccactaaatggcaaaagaattaagcgcgccattttaacatttttcacgcttcgacgcaccgcaaatcatcatatatcttatttttttcatattagaatcattttaatagttagaataatcgatataaaatattatttatttatatttatcaacaccctaaaagttactttagaacttcatgcacattgataaattcatcacattctatgcaacatcataatgaatttgatgttaagatgacccgataaaacaggcattaccatggaaaggtaaataccattaagcgatatttgtctgaccttaaacagttatccgttttttatggcttgttgccccatatcaaaatcaatagaaatctaaggaacaacaatgcttcaaactatgattgcagatttccagcaacatttttggttgtatgtctctattcctttcatgagtggtttaattggctatgtcactaaagtgattgccattcaaatgatgttttcaccacttgaatttaaaggtattaaaccgttttttggctggcaaggtattgtgcctcgtaaagccgaaaaaatggcaacgactgctgtagagcttatgacggctaagctcattaagcccgaagaaatttttgctcgccttgacccaaagcgtattgctaaagaaattgaaaaaccattaatggcagcagcagaagatattacccgtgaggttgcccaagaatatcaaccaggcttatgggaaggcatgcctgagtttgcccgccaaagactgatccgcagagtgcaatcaaaagccccggaaattgtcgagcacatcatgagtgaagtgcaacgtgacgtaaatcgatattttgatattaaacatttggtcattagtaatttacttaaagacaaacgcctactgaacaatatttttaaacgtgtaggcaaacaagagtttaagtttttcagtaacgttggttttgtatttggttttggtattggtgtgatccagatgctctgctggattgtcacacaaggaaaatatccttggatgctacctctgtttggcggttttgtaggtttttttagtgactggattgccctacaaatgatgtttagacccctctatccgaaaaaaatattgggctatacatggcaaggcctatttattaaacgtcaaaatgaagtggcagctgactatgcagctttaatttccaaacaacttttgacttcacgccatatgatggaagagttgttttcaggtactcactctgcacgtgttattgagctggttaaccgtcatgtcaaacaggaaattgacatgcaagcaggtgtaatccgcccactcgttgtttatgcaattggtggagaaaaataccagaatatgaaaactcaggttgcggaacgtatcatgcagcaacttccagagaccatgaaatatgttgagtcttatgcagaagacgccatgaatattcgcaataccctgattgagcgtatgcagaaattaacgccttcggaatttgaaggtatgctacgtccagcctttaaagaagatgagtgggcactcattgcagtaggcgcggtacttggttttgttgttggtgagctacaaatccagtttatgctttaatttttaaatataaaaaaaccggatgaatgaatcatccggtttttattttgctttagatattatttttcaattgcatggtcgaggctaatacgtccagcaccgtgaagcatcaagaagaataaaccacctgccattgcaagatttttcataaagtggatgccattgttatattgtgctgctgcatcagccccaccttggtgaaataagaacgcagttaagatgctaaagatcccaagaccaaaagctgcgaaacgtgcttggaaaccaaataacaacgctaaaccaccaccgaactcaaccagaataactaatggtagaagtccacctggaacacccattgcttccatatatcctgcagttgctgcataaccggtaattttcccccaaccagcagcaagaaagatataagcgataagaagacgagcaacaaggctaataaaactgtctgcgcctggttgcgtcacgatatttttgaccaccacatttggattaaacatattgccacctttatttaatgcttatttgttgatgaactcattctaggtttgggacattgataattaaatactcaaaatccatatatatcgttgcacaaataggatgatcaatttgtatatttttgatgttttatactgactttctataggctcgctgctaggatttgagcacggtttaccacttaatcatctcatggaacttcttgattttattctacacgttgatcaacatctcgccgaatttatcacaaattacgggacgtggatttatggcattttatttttaattatttttgtcgaaaccggtttagtggttatgccgttcttaccgggtgacagcttactgttcgcagcaggtgctttagcggcttctacaggcacaatggacccttggttactgggcattctactcttcattgccgcggttttaggcgatacagtgaactatcatattgggcgttttatcggtccacgtgtatttgagatgaattcacgctttattaataagcaacatttaattaagactcatgaattcttcgcccgtcatggtggcaagactattatttttgcacgtttcattccatttgctcgtacctttgcacctttcgttgctggcgctggcagcatgaattataagtttttcttaacttataacgtaattggcgcattctgttgggtagcttcttttgtcactttaggctatctcttcggtggacatccacttgtaaaagataactttacccaccttatttttggcatcattattattagtattttaccgggtgtgatcggcttcatacgtcaaaagctaaaaaatcgaaaagctaacgtttaaaagagcaattagaaaaaacggaataccaccggaagcatacataaaataagtaacatggccgatcctttatatagatgatcggcctttatttttttcattgatcccgtcaataaagcacgtccgaaaaacatccagaaacttgctgctggaataagaatcaaagtaaaagcagccagaaccatgagaaaattctcaggcgaattccatgtttcagcggggaaaatacctgcggcaaaaagtaaagacttaggattttttaaagttgagaagaataattgacgtgggcgaatattacgatgattttgactaaattgttgtaaatgcgtggttttccataaacggaatgccatccagaatacatataatacgctagtgatgtgcaaaataagcagtagtgcaggccaaaccggatctgccaaatgaatgaacactgcccaaaaactaatgccataagcgtagcccaaccattccattggaataagccagaatgttttagataaaccttgtgagtgagcggcggttgcaagtaatgcgtttgtcgggcccggaataagtaaaacagccaacattgctaatacaaaaaaccagctctcaatcatataatttccacattagtaaagatgcggcaacattaaacgaaatgggcaaaatatagcaagtttagagcgtattccgattagaaagaatacaagttattctaaggcttatttttaaaaaattattgatttataataattttgttatgaaacattttgctaaactttattcatcacaatatgcaattagttagcatattgtgatgcaaaactgatgattaattcgtctttttccgaacaataattggacaattcttaaactgagcagcctgaacaatggcttcttgttgacctaatacacgtgaaagttcggtgtttttggttgaagaagattgtcccatattgacagagatggatgggccgaatccccaaccgcctcgtccccagccaccgccaagcccaagtccaacacccatacctgtactttttggtgtctgtacaccattgtcgatatattgttgaatacggttatattcactttgtagctgctggcaactcaaagattgatactgcgtcggagacacataagtcggttttaccgttgtagcacaagcgcccaatagtaaagtggccgctgccaaaggcacaatatataagcctttcatcatttttctcttatcgttttggttcaatttcgctgaacaatgcctcataagcctgagtcaatttgtgttctggcgctaagtgagccaaaggtaaatttttctgatgtgattctttcatcaaaatcgaaggcggtaacatgctattgagcacgggtaacccttcatcttttaactgttgaaccacttcccgaggtagttttgcttgggactggaactgattcaccacaattccttcaatttccaagcgatcattatgatcatcttgcgtttcgagaacattttcaatcaatgtttgtaaagcacgctttgaaaagacatcacagtcgaaaggaatcagaaccttatctgctgcaattaatgcagacaatgtgaaaaagttaaaggctggaggtgtatcaatataaatgcggtcatagcgcccaaccaagctttgaatagagtcacgcaatttataaattttatgtttgctttcaagtgcatgttcaagagcaccaagcgtagggctagcgggaagcacatctaattttgcaaaggatgtagagtgtacaaaactgtcgagatctttgttgcgtggagcttttagaattgagcccagtgcattcccaattaaacctttttgttgattatttcccaacacatcttcaaagaagttttcaatatttggttctaaaactgctttatcagcagcgtatgttgcttcttcgcctaaaaggtattggcttgagttggcttgaggatcaagatcgataaccaaggtccttaagccatgtttggcactaatggcagccaaatttacagtaatacttgatttccctacaccgcctttttggttaaacaccacacgagttagcatgtttccctctacatatttttttactgtatgcagtttaacctagagcttacgcaaaaagacaaagaatgtagaacaattaagcaaaaacaggtttcactattaccaaaataataatggcaacaaatgcgattgcactaatgaccaaacccgcacggcgctgagctagtaaaatagtgtcatcctttttaaaggctttcattaaagatgataagagcactaaaaataagataattttagcgtagaaccatggctggacctgaaagttcttcatcaccagtaaaattgccccggtaatgaaaaccacggtaaatgacaaatgctgtaaagcaactaaaactttacgccctgctgggttaggttgttcaccttgtacaccaataaatagtgtagaagcgcgtaatacaaaaaccataagtgcggctgctaccgcagtcatatggataattttagtgagtaaatgtgcatccataaactaagcccttagcttttaggtgcatgtgcacattctggactcgctggcgcttggccttgccactcacttggtaaataagcgtggattgctaaagcatgaatttgtcctggattcattaaatcagaagccaaggcataaactttttgatgacgttgaaccaaacgcaagccgttaaattcttcactcaccacaatcactttaaagtgggattctttaccaggaaaataaccaccgtggccggcagactcattaatgacttctaaatggctaggtgcaagggtctgtaaccgttcaatcaactgttgttcaaggctcatagcttttccttttacgattattcgtatatttagacctagtataccctgtctacacacaaacaaaagttgctcttgtatgctttgacttcaaacaaaatgtctatttattcggcaacttatcaataaaaataactctaaatgctcatttctgtttttattttatgcaatcagcataattatttgcataaagttgttgacccttgttttgcttaatgtattataagcggcacgcgggaatagctcagttggtagagcataaccttgccaaggttggggtcgcgagttcgagtctcgtttcccgctccagattggttttttttgagaaagttttagtaaaaactgctcatacatgcgggaatagctcagttggtagagcataaccttgccaaggttggggtcgcgagttcgagtctcgtttcccgctccaaattcaaaaggcacttatcgaaaggtaagtgcctttttcttttgatctgtttatatatttagaatttcaaaatcactcattgccttgatttaagttagttatgttcgcaaggttctagagttattcgatgtgtagatatataaggtaataattgaaaacaatctatattaaagctttctaggcaatgactctgctgtaaacatagggagaagataaaactataattatagatataacttttaaaatgatactgctcagttctttgaacatcattattggttaaatcgcaaaattgtatatgttcaggtgatacatgaaagttgagcttctttaaatgacggctcattccttcaccagtacatttaatataggattcttttaaggtccatatttgaaaaaaacgttgatatacactagttggattagtccattcattttgctgaatccattcaatttcacttggcgctaacacgctatcgacacgcctccattcgaactcatggttcattctttcgacatcgactcctatttctcctttttctgtcacagcaaagacaataaggtccgcagagtgactaagattaaaataaatagccttattgcctcgtacaaaaggtttgccgttaggttgtaattgaatgatgacctcatgaggcaagatacccaacttatctgataaaacagacttcattaacacacgagaaattaagaaaagtcgtgcagcatgagaatgatattgatcatatctcagcttttctgtcgcattgagaaagctgagataatgactcaatataagatggttgtttggtacccgtgaaattgggcaaacataaacctgtacgttcgctacatcagacatcactaagctgtgctgtagtgctgatgtactttgtcagaaccggtgtaaggtaatcataaaccgcttctacatgggtaacgtgtggattatgacctgcgccagcgatgatatgtacaggaatctcaggactgattggagtaacaattggatctttctctcccacaataatctcgattttagatcgaagctcagaaagcaaagctgtctgtgctgcgcgctgctgcggcaaattaatgtggtgcatgtactcactaatatgcttagacactgacatgcggcgtagtgaatccatcgcatatctcactgacagattttgttgcccctctggatgtaaatctttagcaatcacatctttcggcacaaaacggaaaatgagtttagatatcgcttgtatctgaaacatttttgcagcctgtgcctgaacaaaataaggcgatataaggataaggcgtgcaactttatctggatatttctttgcaagatttaatgcaaaaagacatcctaatgagtgggcaatcaccacactatttggtgccaaaagctctgccgcagtatcaataaattgatggttattatcttccatcatttcataactacctgaacgcccaagtcccggtaagtccatcatagcgacctgatcataagtaattttattgatgattggagaccaacatgcactatcaaatggaataccgtgtaaaaataatgcagaagctttttctgaaccaactggctgtttagtataaatttctgtccaatagcggttctgatagctaaaagaattaggtgttgttacgtgcatacgaccaaaacgtgtaaacaccaagcgatcaatccagcgagaaaaataaggcatgatactgatcaggtctgcgatgcccatcttcgccgccatcgcctctgccccagcaacatggtaatgctcggtagaaatgaaagaaagttgctctttagaaccgtcaagtaatacctctggtaatttctcgagcaaaactttaggtatttgtaaatgtggtgagctaactcccaaatgctcagcagctaggtgaactaggcgatgaaatttgggtgtcgcaggatcaagcagcatatactcctgagcaatggtctcaggataagatatcgttcggatcagaaagctcacaatatactgcatattgcatagaggtaggaatgtgtcacgaccacctggtaatgccagtaaacgtccctgatagagcttatcaatcatgtccgcaataccaatatattgcatatcgccataattataaaaaccatcaatgactgtcgccggatttattgcagtccatggcacatttaaacgcttacaggcctcaatgaaagcttgatgccctagaatttttgaagcctcataaccaccatgtttgcaatacaactcatcagccgattcttgcggcggcgcagccacacgatacccgccaatccagataaatcgctcaagctgcttcaatgttgcagcccattcaatcaacgccagccctgacttaatattggtacgctcagcttcagctttgctaatgccccaattaaatgatgctgcgagatgataaattacatggatttttgtctgggcgtccgataatagagagtccagcttaaaatcgcggcttaaatcatattcaacaaaagatatagatggatcaaccagcccttgggttgcaatgaaacctaatagcttatctttcttggttgcggcattacgcagcgcagcaatcacctgatgaccttcacgcagaagttcaacgatcaatctgctgccaataaaacctgctgcacctgttactaatatggtcttccgtgaaaaattatctttttttgcgttatttaaattatccataaatcaccttattaggtgctgggcactccagcattgttttgaagcgagttatcttaaaagttatatcgaacctgggcatacaccagactgttatctctaaattgtcctagtaccgtatcatttctgccccagaagcgatctccacctgcatttaactgccagtgatcattgaggttgtagttaatacgtactctcaacaactcattaggctctggtgcaaaatagaatcctgtaaactctaactttaaattgtcattcaataggttaagcgcataacgcagcatagctccatactgatcttgctcatattggtcgctgattgtttgctgataacggtagactgtactcaatgatggatttgttaggctatcggcagatttaaagtcttctgtatgcttgtacacgcctactaaactcagcgtagaattttttaatgaccattccggccccataactatagttaaattatttttcttatgggtaagatcttcgctgccattcgagtcagtctttgtatatgcagcttcaccgcgccatacgagatcgttatggttataactgaaatcaaacccatagacagacataggattatttttcagttgcaatgtggcctcccctgttggagacgctgaaagaactgacagatcaggcatatgatctaaacctgagaaatacgatgcccctacatctagaccatctacagaataatcccaacgcattgcaaatgcaggacggctcttacggtctatgtcatactgaacaccagcaatctgacgcaatggaatcacatctgaacgactacgcggataccacaatgccgtccatttattggttccagattcaggaatataagtcaatttgattgcatcatttcctagacgttgatctgtctcgtctggtactagacgcgtatagtcacggggcgataggttatccgttgggttaattccatccgctctcccccagacgacaatctgacgtcctaagtcgagataaaacgtctgatcccagttataagaggcatacaactcacgtaagttacgatttaccttactcacctgatctgggtttacagtgtggtccgtttcgtctgaaacccctatgtcgtaatgcagcttaaatgcagggttaaacttgagcgtaccattggaccagaaacttgcttgcccaatgttttttaacgaacttaaatcacgatctgatgaccacacatcgagtctagctgagttttggctcacaaaactcatttcgctgtcatctgcataagtatgctgcagtagcataaagctactgcagcatacaaatacccaataggcaccttgcgtcatttctcaagactctgcggtgagaaaagcttatcggacaaggttttttctgccgcaaaatcattgacgatcacttgcgtcatatgttgagtttgcagattcttcgccatagatttcatggcttgccatcttggtttcactttgccgtaaggacggatatcggtgaattcaatatgttttaatggtttgcctgctgtatcccaaatatcgatggttgctgtaacaaagttgtctttgagtatgcacatacgacgtttgctataaccaaaatcactcttcaccgtattattaattggtgttgcttcaatcatgtagcaatctttgccattaaatttaccatctgccagtttcgtatacttccagtcactgagcttatagccaaggacatcaccataactaaagtccgtaccaataaaagcatcacctttattcgctgaggcaagacggcgtacttttttcaatgcaggtaaatagacgaacatgctatcgctgccttttgcattttcaattaacagtgtcgtggttccttggacatctgctggcgagataaactcagtcaaacgcatgttgttctgcgtatttccagcaagcttagtcatatttttagttaaacgtacacgttgctcgccatttttagaggtcaaaataaatttggcactagccgttgaagacaagaacttagaggcatcatcactacgattaacaatatcttgaacttcatctgcatgagatgttttaggcatcgacattgtgagcgctgtacccaacaaaaggcttgtcaccacagtttgtgcaacaggtatgctcttcttctttgaagaaaagataaaacgaggttttaatattagaatcattgtaggtaccataattaaggttgcaaatacactgaaaagcatcgcaatcacaataaacatcgcgagccattgatgaacgtggaagccttgtgataaggacaatacgccatacccaccggcaaccgcagtcgcgacaaaaagagaagccttaccagcagtacttaaagttttacgaatagcgtctttgatatcgccgccttcttcgcgcaagatttcacgcaagcgatagaggaagtagatggcataatccgcaccaatacctacagccatggccgagatgagagagttcggaatattgagcggaatatcgagccagcccatcacgccaaagatggcaagaattgagaacagaagtggagtcagaacaatcagtccagctgaaatcgaacggaaaaccaatgctgaaataaagaatacggcaaatgaaatttgtagaatgttcatgagcttgccgtgaaccatcgtttcagtcaaagcaatggtctgcgtcacatcaccaccaaagctcactacagccttgtcgcccaattgacccgccatatacgtttttagcgactcaaggatttctttaatgcgatgattactgccagttttcagaagaatcgtgatcttggcatagcgttgagtggtatcaatgtatgaatcaaaatccgtcggctcaccagacattgaatacagcagcagatactgagcaacgacatctttggttgcaggaacctgaaatgcttgtggctgatcagcattcattgcctgattcattcgtttgatatagtccacgatagagatggttttaccgacctctggaattgagttcgcgaacttttcagtattatcaatcgcttttaagatttcaggattttcaataccatcacgaaccttcgtatcaaccataatataaaggctgtttgtgccaccgagagactgattcaagaatctgtcatcttgttgcattggtaagtcacgagagaagaaattacggctatcgttatccaccacaatacggctcgtgccaatagcaaggaagatgcccattgccgcaatcgcagtcattaacatcattcgcggacgaactgacaaaatgacatcaccaatacggtttggaatccaatcccaaattggcaagcctttgcgtttgaccttcacaaccgaaggtggtggcaacattgagcggagtgccggaataaaagtcatctcaatcaccagcgtactgatgatcccgatccctgtaaaaataccgaatgaacgaatagttggaatgttgaaagtcaacagagagaagaatccagctgctgcaataccaccagccagcaccataactggaccaacacgaaccaaagactgcactacagcttcgctattggcagctttaggctccattccttgagcaatcagacgatcaaaatcttcatagtagcgcttgagcaactgcacggcgtgccctgccgcgatggccagaatcagaattggcgtaggcgagttaaagatatccattggctgtttgaacaagcccatcatgcccataccccatgccacagccaacaaagctgtaacgagcggcagaatcaaaccttgcttgctgcggaatgcttcaaagtgcaataaaccaatcactaatacggcaatcgggaacaagatattgatacgcttagagtagtcttcagctttatccagataaaccggattgccaccgacactgatagtcatatctttagattgttcgctttctacgattttattaatcgggcccatcattttctggaagccctctggactttcctcaagctcaagcaaaatcgcagcagtttgttgatctttagataccactgaattcatataggttggattcagtgccagcagttttttcaggtgatcgatatcttcttgagtgactgaactactcggcaatagtttcttggcatcgaacccttctgcattcgcctcgataccttttgcctgacgtgcagccagactcatcatcgtggaacggaccacgcccggtgcattatcaacttcttcggtaatgcgtttgactttctccaatacttgcggctgataaatatcaccctgcttcggggtaataccaatcacgaccatatatttggagccgaatttcttttcaatcagcttggtcgaggtgatgtagggatgccctttaggtgcaagtgcatctgggtcaataataatttttacaccagatgccagatatgccagagcaagtgttaagagcatcaccacagtcaagacaatacggcggtggctaagaatccaacgcgcgtatttctccatcatttgttgagtcttacgaggtggtttattggcctcgtgagttggtttattttcattgccaaccgactcataggcttcacccttctgagccaatgcttgaagattgtcgacatcttttttgaactgggcgagcaccatcttttttagcagtgctggcggcaatacaccaaaaaaactacctggctctgcttcaaacacccattcaatccatgtaccttccggatgtggtttgaaacggtaagtacctgtgtagtgaaagggcccctccactactttaaacgcatacaattcgttcggtaccagatgtgtaatttcacctttaaaggacatttcacgaccaataaagttaaaaccgatttcgtacttactgcccacacgcggagtactgtctagcaattcagaatgcttacacgacaattgccaacctgcatcattggccgggtttgcaaggtagttgaaaaccttgtcaatcttggccggtatgaggaaagcatgttctatggtcaccatagtggttctaccttcttatatttcttatgcaggaattgggtacatctgatcaattgtctgggctacagccacgacattctcagcgtacataattgatgagtggtcaccaggcaaatcgacttgtgtcaacgtgtctttgactagttgatcccaacctagactttctccaaagtcttcctgctcatctttggccttgaccaaaagtattggaaaatcttcaggttctgggaaataggtctggagtgcgatgccattcgccaaataagtatcaaagtaaagtcggaaatctgatgggtctgcatcgagaggcagaacattaatggctttagcttctttaagtacatgatcaaacatttgatctggactcaactcacgcaaatattgcgctgggatcgtcaactttttgccataaggtgcagccaaatcacgggcgaaccaagacaaaagcatggcatcgtcggcatcttcaggtacattttctggaattggagcacgagtatcgatcatgacaatacctgtgacctgttgccccatttgacgcaactgacgactgatctcatatgcaatcgccccaccgaaacaccatccaccgaggaaataaggtccttgaggctgcatcttttgcatttcagcaatatagagcgtcgccatttcttcaatcgccacttccgcagcatcggcttcaatcagtccaggagactgaatagcacgtagtgtacggttcggattgagatgccgcgaaagctccatataacagaaggtactgccaccaattggatggaacagccacagtggttgttcataggttccacggcgcagctcaattacgatggatggtttaatctctttattttcacgaatgatctcacccagatgttccacagtggagtactgtgccaacaaagcaactgacagttcggtaccaaaagcctttttaagatggttgacaagcttcacagctaatagtgaatgcccacctaattcaaagaaatcatcatgtataccaactcgcttgaccgacaagatctgctcaaaggtagtacacagttcgatttcaatcggatcacgcggtgcaacataatcattgctctgctcaaaaatcggctcaggaaatgccttacgatccaacttattgttagccgtcattggaaactcatccaatcggataaacgcacttggcaccatataagctggaagatggatttgcatggtctttttcaaactagcaatatcaagctcttgtccagttacatacgccaccaatttctggtcgttgtcagctgtggtcttaaccagcactactgcatctgtaataccgtcgatttgtttgagaacattctcaatttcacctagttcgatacggaacccacgaatcttgacctgaaaatccagacgtccgtgatgagtcaaacgtccatctgtacgcaggcagactttatcccctgttcggtagagacggccggcatttggtagagatggcaatgttctaaattgggcatctgtcagttcagggcgatgccagtaatcaactgccagaccatcaccaccaatccaaagctcacccataacgcctggtggaactaaacgctgctgttcatcaaggacataaagctgggtattcgccagtggttcgcctaaatcaatatactttgaatcagtgattcgagcagcactagaccacactgtagtttcggtcggaccatagacattccatagacaaccgactttacccagtagtttttctgccaaaatagtatctagcgcttcgcctccacagagtgctgtcaatcccgcattgccgctccattcgctgtctaagagcattttccaagtagccggtgttgcctgcagaacattgatagacttagcatttagataatccaccaattgattgccatcttgtgatacttcacgtggacaaacatgcaccacaccgccgtacatcagcggaatgagtaattcaagaattgaaatatcaaatgcataagtagtaattgctaatagctgagtttcagcagttacttgcaatctatcattcatagatagcaagaaattgataattgaaggatgcccaatacggacacctttaggcttacctgtcgagcctgatgtgtacatcacataagctatgtcaccaaaggcaagcgtctcgcgcacttgttcaagtgccacaacaccagcttgattgatatctaggcgaggcacagaaacgttaagaccatccattaactcggtttgagtcaagatgactttaggttcagcgtcttcaataatgttctgtagacgttcagttgggaaattaggatctagcggtacataagctgcacctgccgcccagattccaaggattgctgctggcaataacgctgtgcggtctaacattagacctacacgatcaccttgagtaataccgtgtgcacgcaaatattcagcaatacccgcaatatgttgacctaactcacgatagctaaccgtatgatcgttcgaggtcagagcatgattgtcaccacgctcatcaatctgcttgagaatcattgtgaatagatcatgctgagcataatcagtcacctttccacggagggcctcgaactggataccatctttataatcaggtgcgatatctaactcaacgatcttacgttcagggtgagccaccatctctgatagtacagcttgcagcagttgcaccatattctcggcagactgtgcagaaaatagatcagtgttgtatttcaatacgccaacgagttcaccttgatattcaccgcccatttccagcgtaatatccaactgcccttcttgctggcgaaccggaaaacttcctaacgtcaaatcttgtccaaccaaagtggccggagtctggattggtaggagtagttctttaaactcatccataccacccagacgttcccagaacattcctatctgagccaatggattaatactgccatcacgctttggtgagacagcttcaactactctagaaaaggcaattttttgatgtttaaggctttgtcttaattgttcctgaacctgctgcgtaaattgacgtaaagtctggtcagcatcgatgtccatgtgaatagcaatcgtgttgacaaactgacccaatgcattacgtaaagaacgttcaagtcgacctgctacgggcgtagcaatgactagattattttcattagagagtttgtgtagcagaacataaaagccagatagcacaagtccgaacaatgtgatctcataatcttttgctaagtttacaaggccagatgacactgactcaggcacacggaaaactagtgaactgcctttatgttgctgtacggctggacgaggatagtcaagcggaatgctatgcacatgtggtgcatgcttcagtgcatttttccagaaaattaagctctcatcagtatcatcaatcacgctgctctgctgcttatcggcatactgtgcaaactcgattccgttcactaaatctgcctctgcaacgagcccaaaacgtttgctaacgtctcgcagcaatagaccaattgaccaaaaatccatgagcgcatgatgaatcacaaatgcgattacataatgattttgaccgcgttcataacaatgaatacgccataacggtggctgagtcaggtcaaatggctgcttggtgtcctgttcaaccaattgcgtcaaatcagaagcttcaatatgacgagcatcagaaaagatgatattcggatacacgcgatcccagatcagttgctcaattccctgatcattggctggcatgcttacgcgcagtagcggataatcatgcattaccgcttctagtatttctattggcttgttacctaatggttggttaaccttcacatcaaaggccaccaccatattgtaggcactgcaagttggctcaaaacgctggatataccaaatgccaagctgctctgcagaaatcgcatgacgcgacagaacttccggttctagtcgtgcaaggttgttcatgaagcaactccctgctgcaactcagaaacaagatattcagccaacgcattgattgttgggtaatcccataatagtgttggctcaagttctaatttcgtcagatcttctaaatccccagacacagacaaagcaacaatcgaatcaagaccataactggtaaatttttgatctggatcaatcgtctcaggctctacgcgcatctctttagcgactagcgtacgaatgattgcgctccagtaagctttatctttattcatggggtaatctcctttttaaccggtttggcatcacgcggtgccagtgcaaaatcgatgacagataacatgtgattggttgaaattcggtccagcagatctgccaatgtgctttcacgtagtgacgtcataggaggagctgtctgcccttcagcagcatttaagaaaatgatcagccatgcaccatcctgtaaagcaggccttaaaccatggcggttaaaaacccagaaacccaacacagcaatacgagcgaataactcggcgtagtcacgggcgagactgaagcgcatcgtttcaaactccttgctttgctcagaatttgaaaagtagtcctgaattttttgatccaatgaacgctgttcaacaagaagctggtttgctcgctcatgtagcgtagctagcgtctcagcagacaacccaactgtgacattagagtcgttgagcatttcgatgattgtttcgagtgactccatcaccaagtcaccatctcggttgaaaatctcaagctcacggaaatcaatagcacctgtctctacctgtaagtcatataactggcgatagcgtgctttcgcttcagcttgattgagatggtcggcttttttgctgcgccctttattggcagatttgagctgaaaactcagactgtctaggcagacggtgctactaccgtcaaacacactgacaatcagatggtccctgaatgctttctgaaacattccatctgcatatgcatttcttaagaaaaaacgtgacccaagcactgaggatgtgattttggcaagcgactctacatattcaggcaccagtaccttgacgattggtgaccatgtactgaactgattgatacaaacgtgtaaccctcgcgcaccaacaagtgataacacctccgctgctaaaaggtaggcataagctgtagcgagttgctcacgtaccaacggtatgcttattacttttttgttatataactcgcgttcaatcgcaaactcggttgcgatgcgtagcatcgtatcgccggcacctagagagaaactactgcaatatgcacgtgttacctgtagagttttgagtccaagttctaacccctggccttcttcaccgatcagggcatctttatgaatttcagcgttattaaaaccaataccgctgatatctaaaccacgcatgcccactgttggcaggcggttcaggctatacgtacctttagaagccatatgacgcttatcgagccagaatgcactcaggctacggggtccacgatcatttgacgttttagcgattagacttaaagagtcacctagagtggcgcgattgatcgaccatttctcgccatttaagacgtacttactgtcggaaggttgcgcagtcacttcactagataacaggtcagcaccatgcgctttctcactataagccagcgctggagcagcaccacttaaaattcggttagcgatgttttggcattggctctcattaccaccgatccatacgatcacagaccaagcattcgtgctataggtcgaattgatggtcagatcgcgtcgtgccaacacgcgatgcagatataacaactcttcaccaatttccatacggcctccaagctctgaaggcacatagaaacggttcatacccaccgcattcagaaaatcaacagctcgctgtggatattgctctttctcatcacgctcgatagctgcggaccaagaaaaatcattattggtatcatgtacggagcctaaaatttgctccagacgagcagcagattgaaactgccgcaaattggacgtaagtgacatggattttcactcaaagatttaaaagataagggttaaaacaaagcacttttcagacgattaaaaatcagcgtgcgtacttcacgttccttgatcattgagttgagtagattggagctataacgaatcagctgcccccgctgctcacgatcacggatgacgtctaagccgttcttgacatagtttcgagcaatcaccgttctacggtttggatgggttaaacagaccagttgaccgcgttcgatctgctctttaatttttcttcttctaattttgccgctagtggtcttatttattcggccttggtgcagtaaatagacaccgtctacaggcaagccaatatcagccgccacttgttctttaacttgagtcctgatggtttcaaaattaagtgtcttatctaaggactttttcttaatctcaagtacaaccgtaaccccttcagaatcagcaaagttcactgccgcaacacaacctttacgaacagcaggatgtgccatttcaacagagcattcgatatcttgcggataatagtttttgccacgaatgataatcacatccttaaggcggccggttatataaaggtctccgtttttgataaagcccatatcacccgttcttaagtagtgtacttggctaggttgtcccgcttcattaaggatcgttgcttcaaaagtttcctgattaacttccggcttttgccagtaacctgcagtgacactctcacctgctagccagatttcaccgacttcatgagccgctacctctttacgggtatgaggattaacgatacgacaatcaatatgtttcgagatcttgccacaactcactacttgcacggctgtctgatcttggctggtctgtaccaaatgggcatttaacttgtcacgatcaagtgaaatcgcattgagagggccagttacgccactgactaagagcgtcacttctgccaagccataacatggcaagaaagtatcaagtcggagcttcgattgtgtattgaacttctccatgaagcgttgcatgacatgggccttgatcggctcggcaccattaaacagcacacgcacacggcttagatcaagcgctgcagcctgctcatcagtgatgcgatgtaggcacaattcataggcaaagtttggtccaccactaatcgtgacgcctttttcactaataaattgtagccatttaagaggttttcgaatgaagtccagaggcgacatgacataacaagtcagacccacatatacagtttgcaaaaccgagccgatcaaccccatatcgtggtaaacaggcagccacgtcaggccaacatcttctggttgtgtaccaaaagcttcagcaatcatgacttcattggccataatatttttatgagtgacaattacgcctttaggccagcctgttgagcctgaggtatattgaaggaagcagatatctttttcagtaataagcggaaaatctttttccaccaagtcacgctgcaattcggcatcaacagcatgtaatatcaaattttcattttgagcttttagtgtgataagacctgcgagctcaagaatcttttttgttgtgagtacaatcttaggctcacagtcattcataatattcaaaatattagaaaaaccgttgcggttaaaaggcaagctgactggtactgcaataattttagctttcagacaggcaaagaacgatacgataaagtccaacccaggttcgaacagcaatacggcacggtcaccactgtctacaatactcattaatatttgggcttgatgttgaactcgctcattcaaatctgaatatgtcagagattgaataccaccagactggcgtcccaaatactcaaaagcgatcttatttccatttaattttgcgtgggattccaaagttgcaatgatattatccgtacacattacagccataacttactccgattaattataattaacctttaaaatctgctaattcagaaacgacatttcttgctaggtttcttaataaaagaataaatatactttttatttaaaatataaattcacattatattttatgtgtgagtgttacttattacacctgtaagtgtttacaggttagtggtctcttattgaaaattaagaagctaaatcctttatatgaatcatttttgttcagttatatatttttaatttcttatcattattttaaattaatgcctcacctattcctaatttagatacgcacaagccaagtctttgaaggtttttactcttaaacagttgcatcattattttttaactttagagtaaatatttttaaaaaatatataaaaaataatataaataaaaaatcaaactatttatatttatataggtacacataaaaataaatatttaaaaatacagcataaagataaataaaaaattttattttaacattgaaatatacttattatatttccttaaatttaaaataattaattaacttaaatcaatcatataaatcttaaaattatttatttcttttaattttaatattaaagtcctgtgttatttatactctctacaaaagccctagcattactgctcgaatagctgctgaaattttattatttacatttaacttttgcatagagttactgagatgaaaatttacggttctttcagttaccccaagaatctgagctatttctgctgacgttttgccttcggcagtccaacgtagcgcctctttttccctgttcgttaaataaagattgaatttagcaaactctacatcatttactattttagcaatgctggaatgcactgtttgagtcaaccagtacatattcgtatattgtgctttttgctctttttctgataattggtcgttggatcttgccagtgttagcattcctcgggtcccaataaaatcacgacttgactgagcccaaccgacatttaaaccataagaacgcgcctcctcccaaaaatctttttctgcctgtgtttttgcagattgactcgaccaaacaagaggttgaagtgataccatacaatgctgcacagttggatctatcttcacatattgtcgttccacataacgtttctgccatgcttctggataattattcaacataattgtttttggttcagcaatagataagggtgattgcataccataagcgcaatagtcaaatccgagccttgatgcggtagatttaacgatctcaaataactggtattcattttttaccaccaaaaatgctgataataaatcttcttgccaactttccatttgctctcattagactccattcacagactattttttattcggttgcatattgtgaatccaagcaatcaaattgaagcgtaggtctaaccttttaccgtaatttccataaagtccttcaaaaatctaaaagattctgaagttgctaaatatattttcggcgcctactcttctattagagctctcaattaaagattttgaattcatcatccaattaacaacacttttaagcccgaaatggttgcaaattattcagataaactagatgtctgaaagctttcaaggttgttatatttcatgcgcagattatgctttaaaaattaaaatttacacgatgcattttattccaaaatatatatttttttaatttataaagaggtcgaccacttaatttttatagtatgtttttattaatttaattaaataatattgtttatcaattattcgatatctccaattttcttattttttatatataaaaactaaaaataattataatattttaaaaaccaatcaattaaagtaaaaatcctcatacttgtaattattatttgagtagtagcaatattgactatctaataagctccatcgtaggattctctttaaaaaaataatttttacctgaaaatctctctaataagaagagcttaaagatgtgctaacaaattatagttaacctgttaaatataacagtattttattggcaaaaatttatgttatttattcattaaatcttaatttagggtacttaagcaggtagcatggttagcataccccctcatttctctatctcaacagatggttttattcgaatgaacgaaaatcaactcatgagttatcctctccaacacatcatctctaccgttgaatctagacatactgaagcgtctcaaattttctattatggttttactgaatgggcaacctcacaaactccagctttaagtaccggatgggattgggaatttattgagcaaaatggcatcacgagcataaagcgaattggcctgcctcgaagcaatatcatgattgttgatctatctggtaaagacattggatatgatgtgactgaaatactaattgaaaagagaatcgatactctgttctgggaaccgtttatttatgcccaaatcaatacgtcattaaccaagtcttcattaagacaaaccttctcttagaaacctgtaaattcttacagttaccgcctttccagctgttcagtaaagtcacttgaaaaataagcggaagcacttgtaatgaatattattgctggatttcaaaacaatttttcagaaggcctatataccaaatttaaaagttaccgctacagggtatttgttgaatatttgggttgggagttgaactgtccaaacaatgaagaactagatcaatttgataaagtcgatacagcttatgtcgtggctcaagacagagaatccaatatcattggttgtgccagactactacccaccacacaaccctatttactcggggaaatatttccccaacttctcaatggaatgcctattccctgctcaccagaaatttgggaattatcaaggttttcagccgtagatttttcaaaaccgccttcctctagcagtcaggctgtgtcatcacctatctcaattgcaattctgcaagaagcaattaattttgcaagagaacaaggcgcaaaacaactcattacgacttctcctcttggagtagaacgtttattacgtgctgcgggttttcgtgcccatcgtgcaggtccaccaatgatgattgatggatattcgatgtttgcatgcttgattgatgtgtaattagatatctaaattttcatcaaatcaaggtctaaaacattggtgagattatgaagattgaagacgttagttcaaatatcgtttcgtccactaaatattaaaagctctactcgaaaaattaaggttttcttgtttacgtagatctctttagttaaataaaggcctatctaaatttattcataaaccgatcattcctttaacctttttatttaatagattataaaaatttgcaaagttctatttttattggtttaaaataaatccaatccgttatttattttataaagcttaagcaatagggatactttatcaatacacaaaaagataaataatatataaaaataggccaatataattctttattccatagctgcctgtgaaaaattcattttatccgtttggtaagaactcttttacaaagtgcttacttagataatattaaatgagctatagaatacaaaaattataataatttagtactttaactccttcttaattttctgacaaactttcaaagtggagtcgacctcacttgaagtaagattaagtttgcatttagtattttcaaatattttacctactggaccttttaaatccttacctgactccgttaatgaaatatattttcgacgacggtcgagcgcgtccactgatacaacaataaaacccgctttttcaagtcgctttatgattggagtgagcgaaccaagatcaaacagcgtttgttcacttaataagctagatgacaagtgattttgattccaaagagcagccaacaccaaaagttgtggatatgttattccaagttcagataatggtttggtgtagtttcggatcatagcattcgtcgtcgagtacagtgtaaaacagagcattttgtcaaaattaaatgtatctagcatcgaactcatctgttatgtcctaaaaaattaaaaacgatgaacagcctcaattaacacggataccgagtctgggtttgtttctttcgaaattccatgccccaagttaaacacaaaacctgtatcatctttttgttgttcataaaaagatgtcataactttattcacttcgttttgaattacagaatttggggcaagtaatactgcagggtcgagattaccctgcaaggcaactctagaacccactcgctgacgtgctaaatccagatcagtcatccaatcgagccctaaagcactagctccacatcctgccatttcttcaagccattgaccacccccttttgtaaagacaattgaaggaactaaacgctcacctaactggttttttaagctatctaaagtaaagctaatgtacctgagagaaaattcttgataagcagctcggcttagtaaccctccccacgtatcaaacatcatgatggcctgtgcaccagcctccacctgacatttaagatgctgtacaacggctttggcatttttttctagtaattgatgtaagattttcgggttgctataaagcatactttttatagttataaaatcttttgaactctgtccctcaaccatgtaacaagccagtgtccacggacttcctgaaaaaccaatcagaggaacttgcccattgatctcatgacggcattggctaaccgcttgatatacataagataaagattcttgggaaggaatctctaaattattgatcgcttgttcagaacgtataggttttttgaatttaggtccacgattttcttcaaaatataaacctagacccattgcatcaggaatagtcaaaatatcagaaaatacaattgctgcatctaaatcataacgtcgaataggctgcaaagttacttcagttgcatagtcaggcgtcttcattaaattaatgaaatttcctgccattttacgtactgctcgatattcagggagatagcgcccagcttggcgcatcatccagatcggtgttcgatctacgggttgtttttgtaatgctctaataaagttagtatttttaagcggtgcaaatttcgtcatttgagactctaatttataaataaagatttagctaattcgattatgattcgcagcatttttcatttctgaaatagcttcttgataattagaagtattaaagatcgccgttccagctacaaatgtatctgcgccccatttagcaatttcagcgatattgctcacattcacgccaccatccacttcaagacgaatatttctaccacttgaatcgattaactttcgtgcctcagcaattttaggaagaacagcaggtataaatttttgtccaccaaaacctggatttaccgacataatgagcattaagtcgatgttatccataaggtatttgcatgaatcaagcgaagtagctgggttgaacaccaaaccagctttgcatcctaagtctttaatgagctgaattgaacgatccaaatgaatagtggcatcagggtgaatagagatatagtttgcaccagcttttgcaaaatcaacgatcaaggaatccacgggtgaagccatcagatgtacatctatcggtgcttgaattccttcagatctaagtgcagaacaaacttggggccccatggttaagttgggaacatagtgattgtccataatatcaaggtgaatcatatctgcaccagaatctaatactgacttcacctcttcacctaaacgggcgaaatttgctgctagaattgagggagcgatccaaatgtcattcatataaagagcctaactataaaaattattatcaatgatttgcaaaagaagatttgatatccaaaatcatctcgtgacttaagttttctaaatgtaagtgatgaccaccttcgtaccagcttacttttgcattttttcctaaatactctgatttcgaatgaaatttatcaccaacaaataaaccatttgttccaagcagaatagtcaaaggacaatcaatttgatttagaaagcgaccagcttgtgcatcagtcaactgaattggttctggtatagtaagccgaggatcatgtcgccaccgatagcctgattcgactgctcgaagatcacgttctgcaagccgtctggcactgtctaaagagataaatccaccaactactttctggcgggttttcactgcaacctccatacttgaaaactgaggttggttcttttctgaaaacccgttaagtttggtcaaatgtgctatttcagaaagtcgaagcgatgttttcaaatgctgcacgacatcttcagccgagacggtaaaaggagctcccataccatcaatgaaaactatgcgttttattcctttactaatggtatttaaaattgatgcaacacctgtacccattgaatgagccaaaatagaataactgttccaccccatttttctgacaaagatagataaatcaattgcataatcccataagtaatatgcttgatttggttttctatgatctgatttgccgtgtccagcaaggtcaggagccacaatatagtagtgatctaggtagggagctattcgtgagaatgatgcacaattgtccaaccacccatgtattgctagaattgggggattttttttatccccccaagttcttactgctaaatctaagccattaacattcatcgtgaattcacgctctatagcaggtaaaactttaaaagttaaactcatcatatccatatcgttttctgtttaaattaagtcttgacgaattaaataatttttaaacagcgacatttgatcttgaggttgtttcgtcagctaattcgctctcaataatttgttttaagtggattaaatcaaatttaccgtttgaagtacgaggaaacgaatttaagaatctgatcgtatttggaacttgatgaggttccaaatcatttctacatttttctaagagctcaagctcgttaatatttttattatcagctatttgaataaaagcatgtaaagtcccacctaagttctcatcctcaataccaacgacaacagctgattcaatattaggcaaactatagaaataattttcaatttcaacagggctaaccttcataccacgagatttgataacgtgatctgtgcgaccacggaagtacaagtaaccatcttcatcaagaaggcccaaatcgccagtatgtaaaacatattcattaggcaaaggtcctggtttaagtttttcttgagtcgctttagtatcgcgccagtaccctgccataacagttgctccacgtatcacaagttcgccgatttggtttggcttattaattttgtttccatgagggtctattaaccacatttctgtatttggaattgcgataccaacactatcaggtttattgtcaatttggtctggtgggagatatgtgcaccgtttacactctgttaacccatacatagagaatatttgtgcgttcggaaagagtaatttcatctgttggatgtgatgagatttcagtgctgcaccagtatttgttacgattcggacatcaggaaaggtaacgcccgatctatgcgaatattcatagagaagcgatagcatcgtaggaacaaatggaatgactgttatcttatgttgttttatttttttaattaaaaataacggccatgtaagttcctgttcgaggaataacgttgcacctttactcatagacataatcatttggtaaagaccataatcaaatgataatggcagtgaacaaagaatatgatctgattcttgataacctagataagtattcaatgaatctaatgctgcacacatgtttctatgtgtcagcattacacctttgggtgttccagttgagccagacgtataaacaatagctgctaaatcaatatcgagaatattattattcagatattctacttcattgtaagaagttgctagctcccatgaatctacatcaggatccactaatgaattggtaacaacaacacttttaaatagaatacttttagacgctacagatacttcttgaaacttttgttcattggtgatcaaaattgaagcctgagaattctcgataatataatttaatttatcggtggttgtatctaagcccacattacatacaacatagcccgctttcagtacaccccaaaaagcaataatagtttctactttatttcctaaacaaagtactactctatcaccacgatgaagaccctgagcttgtaaatagccacttaagcgcgaagacaactcatcaatcttgctataagaatgtgagtttccattctctacaattgctaccttttcagcatatttacgtgcgatataagataaagtgtgatgcggcaaaatattatacatttgcatgacactgctccttcatctcaacttgattaaagcggtttttttcagcttcgatataagatgcaagtgtttcaattgtattgaaatgcttaggttctatcgtttctggattaacaaagaaatgttcgatttggtcttctaaagcgaccaatatttctacagaagaaagtgaatcaatccccaaatcatcacgaagatgagaatttgcaagaatagttttgtcttgaggtaattttagaattttactaacaatagtggcaacgatacgctgtgtgtcatctgtaatgacttcattatgcttttcttcagtaatgactttgttttgtcctagcagttgctctaatgaaatatcggtgtgcatcgaaataatatcttcgactgtatctctataacgtactaaatttagttttccatttgagtacagaacttctgctgggtagccatgaccgtgaaataatgttggggaagccgtagccccatacgcaccagatgataatactgcaagaagatcaccagattttaatttttcaagttttatatcttttgctaataaatcgtcaggattacataatggtccagaaacatggtaggtttcaatttcatttgatttttggtcagtaactttaataatctcaaaatttcgttttaaaacctgaccagaacccacagcggctgaatggcagtttgttccaccatcggttacggcgaaatttttgccatggttttgcttgatattatcaacagtcactaacagagccgcacttttaccagcaatgaaacgtcctgactccataatgatgcgagttttaggatgttttttgtgaaagtcattgaataaaggatgtaataatcttgttaattctttgatgtctagatctttttcattttcatgatacttaatacccagaccacctccaacatcaaccatcgtcaggtctaatccatacaaacgtgaaatagattcaaatagctccaaaacatattttgagttgtcgtagatagactgtgcatctaaaatttttgttccattataaacatgaagtccttttagatgaatattaggaagttttgcgtaactccccatcttttttatggccgtttcttcttcaataccaaaatgtgtaggtctacctcccattttccatggagaaccagatgctgagaaattcggattaatacgtattgctactggcgctaaaacccccatttttgtagctaaatctgataattttttaagttcttcttcagattcaacaacaatagcaaaaatatttaattctaaagcgcgtctatgttcttcttcttttttcattggtcccaagaaaattatattttgagggttcacacctgcttttagtgcaatttctagttccgttaaagaacatacttcggtgtttccaccataagacttaattaatttaacaattgataagttaggattaactttgagggcataaaaaatatcaacgcactttggtaatgcatttcgtaactcttgaaagctgcttttcaactgatattcatcataaacatatattggtgtcccaaaatttttctttactttcaataaaatttcattggacaagttcattttctaaaatacctacaaaaaagtgtttttatataaaaaataagaatttataaaactttgcgcacaaagttttataaattattgcacttttgttgtttttttgtcaaacaattaattaaaaaaataatattttataaaaaaatattattattgataataaatcttctttttatgtaattaacttatttgaatgattctccaaattatcaatttttaaaagccctagtttaaaaactagggctttttcttttaaaattttaaatattcaatcaatcttggtttttagatttaagtttgctttcttataataagtctcatcctttttatagctccaatcgcgcggcataaatgatgtcgatataatcgcaactacagccatacttccgatataaaacataattaaatatggattgccttgcccaatactgagcagtttagtggcaatcataggggctaaaccaccacctaaaacacctgccaactgtaccgaaatcgaaataccgctataacgaatttcagcaggaaattgacgtgcaaaaagctgagcttgtggcgcatacataatcggaaacactacaccaattgccaaaacaattgccgtccagaccagtaccggatccttggtattgagcatgctaaaaaatggataagaataaagtgccaatacgcatagaccaaacataaacatattgcgttgaccgactttatcggacaaatgtccgcataacggcgtcataaataaaatgacggctgcgccgcaaatggtggcaaataaaatgtcttggcgtggaattccaagttgtgcggtggtataagccaaagtaaatgttgaagcaatatagaaccatgcattttcggcagcacgagctaaaataatggtaataagttgctttggatggtttttaaaaacctgtaaagcaggaactttgacttcttcagactgttgttttactttttcgaaatctggtgactcaggcacttttacacgaatataccaacctactgccagtaaaataatgctagcaagaaatggtaaacgccaaccccagctaaacagtgcttcttcaggtaataacgacaccagacccaacgcgattgaggctagcattaagccaccacctgtactggcttgaggcaagcttccccaaaaccctttaccaccttcgggagcatgttcaacggccatcagtacagcaccgccccattcaccgcccattgccatcccttgaataaatcgtaagacaaccaaaccaatcgcagcccaatatccaattgattcataagtcggtaataagccaatcagtacggttgggatccccatgagcatcaaggtcaacagcaacatcgatttacggccaatcttgtcaccaaaatgaccaaagactaagccgcctaatggtcttccaataaatccaacggcataggttgcgaatgcggcaagcacgccggtaagtgcgtctagatttgggaaaaatagcttattaaaaatgagcgctgccgccgcaccgtaaataaaaaagtcataccactcaatggtggtgccgaccatgctagagatacctgctaatcgatgtgacgactttttagtatttgaaccgtttccatgtattgattgcatcgtaatatcctttttagattttcttgttttatcttttttatgcttatgaccagccctgaccataagcattttcaggtctcgctttttctccttaagctttttatatttttgtaattcggtttagctcaatttttctaaaattggctcaaatttcgaattacgttcttgccactgtggttgtttgtctttatcgacaatgagagcgcggacaccttcaataaagtcaccgtgctcaaaccaaatatcctgtaaatcacgttcaagctgcatgcactgaggtaaagagaggcctcgacctaaatgttgcagttttaaactagtttgtttggcaataaatgagcgctgctgcaaaatgctgagcatcttgcttgcccaagtctttaagctttcatcttgttcattttcaagactttgctcgatttcatctaaatgttgatatccgaagtgtttacggataccttccgccaattgttttaattcactttcggcagggcgagtaataaatcgggtaatgatgcgttcaattccctctttgcttaaacttggtgcgtcaacgagagcatcttgcaaagcttgtaactgctcgcttggcacatggtagtcaattaaatcgaggtaaagcgcatcactactgctgatctgctcacccgtaatggccatataaacaccaatatcatcaaggcgagacaggaagtgtgttgcacccacatctgggaaaaaaccaatcgctgtttcaggcatggcaaatctggacttttcgctactcaccacaatatgacaagcctgagccaagccaaaaccgccacctaatacatagccatcaagcacaacaatgattggcttttcatattcacgcagtatatttagcattttatattcggcactaaagtagcctttgtaatcggccgtgccatttttataactgtcatagagatagcggatatctccaccggcacagaaggcttttgggctatttgacttaattaacactgcctgaacagcagcatcatttcgccacagttccaattgggcgccaatacttttaatcatatctagcgataatgcgttgagatgagtcacacggtctaaggtaattatgcccaacttaccttgttgctcaatcattaagtgattttctgtattcattttattgatctcttattgatttttaaaatttgcctttcgtttttcaacaaaagcctgcatcccttctttttggtcaaatgttgcaaatattgaatggaacatacgtctttcaaaacgcaagccttcagtaaggtttacttcaaaagctcggttgatggtttctttaagaatcatatttgctgttaaagagcgtaccgcaattttttcagcggcttgcaaggtttgttcaagtaattcttctttagtaaacacacgtgcgactaaaccactttgctctgcttctacagcgcccatttgacgagcggtaaggcacatttccattgctttggctttaccaatcgcatgggttaagcgttgtgtaccgccaatgccgggaattacacctaaggtcacttcaggtaagccaaacttggcgttatcagcacaataaataaagtcacacatcagcgccaactcacagccaccacccaatgcatagccactcaccgctgcaattagaggtttacggcgctgtgcaatacggtctgcaagatgaaaaaagtcatctaaataaatatcaggaaatgccaaatcagccatttctttaatgtcagctcctgcggcaaaagccttttcagaacctgctaatacgatgcaaccaatttcgcggtctttttcgagctgatctaatgcctgattaatttcactaattaattcgctgtttaaagcattgagcgcttgagggcgatttaatgtaatcagtccaaccccattacgcttttctaataaaatactttgccactgcattacttattccttgttctgattttatagactacgtgcgatgactaaacgctggatatcactcgtgccttcgtaaatttggcaaatacgggcatcacgatagatacgttcaattgggaagtctctcaggtagccatagccaccaaacacttgtagtgcactcgaacacacacgctcagtcatttctgaagcaaataacttggccattgaagcttcattgagacatggttgacctgcttcttttaaacgcgcagcgtagtgaaccagttgtctcgctgcttcaatttcagttgccatactagcaaggcgaaacgcgatggtttgatgctcaaaaattggttttccaaaagtaatacgctctttggcatagcgagttgcttcttcgagcgccgcacgtgctagaccgactgcttgtgcagcaataccaatacgtccaccttctaaattggcgagagcaattttcagaccttcaccttctttacccagcatgagacttttatggatgcgtacatctgtcagcgcaatctgacacgtatctgaagcatgcagacccagtttttcttcaacacgaatcacttcatagcccggtgtttcgcgtgggactaaaaaggcactaataccttttttgcccgcgctcggatcggtcacggcaaacacaataatgacgccagcattattacccgaggtaataaactgcttggctccatttaagatgtaatcgtcaccatctttcaccgctcgggttttaatggctcccgcatctgagccagtatgcggttcagttaaggcaaaagcgccgatcatttcaccttgagccaaaggctttaaaaaacgctctttttgctcgtcggtaccaaattttaaaataggcacacaaccaaccgagttgtgtacgctcatgatggttgaggttgcaccatctgctgccgcaacttcttcaagcgccagtacataggctaagttacccgtgtcagaaccaccccattgctctggaacaagcattcccataaaaccgagttgccccatttgagtcagagtttcttttgggaaagttccatctcggtcccaatcactggcattaggcttgatttgttcttgggcgaaacttttcgccatatcacggatgagtaattgttcttcggtaaattgcattattatttcctttaccctgctttagcttgttgtttagcaatttcttgattacgcaataaaaagcgctgaattttgccacttggagttttaggtaattcactcacaaattcaactaaacgtgggtaagcatgtgcagaaagtcgtcttttaacaaattggctgagttgttcagcaagtgtatcggaaggttgagcatccgcagctaaaattacgaaggccttaaccacttcggtacggtccggatcaggcacaccaatcactgctgcttcaatcacagcgtcgtgttcaagcaaagcactttctacatcgaaaggcccaatacgatagcccgatgtagtgattacatcatcactacgaccaacaaaactcatgctgccatcggcatgaagctcggcagtgtcgccagttaaatagtagtgacccacgaaaggcgattttcggctttctttatagccgccgaaccacatcattggagactggctaatatcgactgctaaaattcctggggtgtccgctggaagctcttcaccttgttcattaacaattgcaacacgatagcccggacttggaaaacctgctgaaccagcatgaatttcatgttttaaaccatgatgattacacaccaccatgcctacttcagtttgcccgtagtggtcataaattggagcatcaaggacttgtttaaaccaacgaattacttccggatttagcggctctcctgcactactcaccacacggaattgtccttttaacggcgccatttgtgccggatcagctgccatcatcatgcggtaagcggttggtgcacctgccaagttgttaactttataatctttcacaatttggcataggctatcggtactaaaaccgccttcatagaacaaagtggcatggcctaaaaataacggtccagtaatcgcatagtacagaccatacgcccaacccggatcggcaatattccagaatgaatcctcttcggttaaaccaatggcatcttgcatatatcgaccaaaagcaatcaatgcttttagtggcacttccaatggtttcgctggtcctgtagtgcctgaagtaaacataagcaagaaaggatcttggatgctacgcatcaccagatcacattgatcggactgctgcttcacttcattccagaaattaaaatcacctgctttaagcggagtaccttgtgcgtcggccactgtcataattgcagggcacttttcaatttcgtcgagcttgctacggttgcccatatcggtcaccaccagcttactttgagcaagttgaatacggtgctcaatcgctttgggaccaaaggcagtaaataggggttggtacaccgcaccaattcgccaagctgccaaaatggtcacgatcagttcaggtgttcttggcaataagcctgaaatacggtctcccgctttcacaccttgtgattttaaaaagttagcaaactgactcgaccattcttttagttcacggaaggtatattgttctttgcgaccgtcttttccttgccagtacagcgcgatcttgtcgccatctgcatgtctatcacaacattcataacatgcgttcagtgcatcgagtgaacctgacaacatctgtttagcagtgctttccaaatcgaaagcctgtacagcattttgataatccatcatatcttttccctcagtccggatttgttgttattcacgacagggtttgatttattcgtttaaagccatcctttggctttaccgttatgcctcttgtggcaggtattgctgaataatgctcgagaaatcgagatgagcattaccacgcatacacatttgctgataaagctgttgtaccatgccacctaataaaaccggctgtttcacttggcctgcggcttctacagcgagtcctaaatcttttagcattagctgtgtcgcaaaaccgtcttgatagcctcgagatgcgggcgcattttcattaatatgtggccatgggttacacacatccgaactccagcaacggccacttgaagtattaattacacctgccaatgcttgtgggtcgatgcctagcttcacaccgagtgccatgccttcggccaccgcagccattgaaattcctaaaatcaggttattgcaaattttggcaatttgacctgcccctacatcaccacaatggacaatatttttgcccatatggctgagcacaggtttcacctcattaaaggtttgttcatcggcaccgaccatgaaggtcaaggttcctgcttgagcaccaatggttccaccagaaacgggtgcatcacaaattttaatatttttgctatgtgcaacagcagcaatgtctttaatggtttgcgggtcaatggtgctgctatcaatgcataagctacctgcttttagcacttccaagacaccattttcacccaagtaaacctctttaacatgcttcgccgcaggcaacatggtaatgactacatctgcttgtttagctgcattctgtgggctgtcgcagaccaccccacctgcctcggcgaagtgctgaatagcaacttcactgaggtcgtaaccataaactttgagtccggcttttagtaggttttgggccattctgccgcccatattacctagaccgataaaggcgatattcatccgtgatccccttaacgtaaactaatggttgtatttacaccgccaacttcatggctatcttcaaaccagcgactggtaatcgttttggtttgggtatagaactgcacagcctgtttgccgtatggccccaaatcacccagtttcgaacctcttgaaccggtaaaactaaagaaaggcactggtacaggaattggaatattgataccgacttggccaatatcgatgaggttttggaaagtacgtgcaatggcaccgctttgtgtgaatagacctacaccgttaccaaatggattggcattgatcaaagcaatcgcttcatcgagtgtatcgacacaaataattgaaagtaccgggccaaagatttcttctttataaatacgcatgtcggtatttacgccactaaaaatcgtggcacccacaaagttacctgactcataaccttgtacttgaacattgcgaccatcgagtagtaactctgcaccttgctcaacaccgctattaatcaagtcaattacacgcgctttggcacgttttgaaatcactggaccaatgtcagtatttggttcatgacctgcatttacttttagagttttggctttttcaactaactcttgaatccactgtttactgtcgccaaccatcactgcaaccgacaatgccatacagcgttgtcccgctgcaccgaatgctgcacctactaaagcatttaaagtttgttctttattggcatccggcatcacaaccacatggttttttgcacccatcatggcttgcacacgtttgccatgctgccctgcaaggttataaacatgtgttccaaccgctgttgaacctacaaatgaaattgctttaatgtctttatgggtacacaaacggtcaaccacttctttaccgccatgcacaacgttcagcacacctgccggaatacctgcttgaatcgcaagctcaaccaacatcatggtcgataatggatcttgttctgaaggttttaaaacaaaagtattgccgcacacgattgccattgggaacatccaaagcgggatcatggctgggaaattaaacggcgtaatacctgcacaaacgcccaaaggttgctgcaaggtatacgtatctacaccacgtgctacaccttcaacatattcacccatttgtaaagtaccaactgagcaggcatgttcaaccacttctagaccacgttgaatatcaccttcggcatctgccaaagttttaccttgttcagccgtcaatacttgtgcgatttctttcatgttggcacggatcaagtcttgtagcttgagcatgatgcgcatacgtgcctgaattggggtttggcgccacgaagcaaaagcatcttgtgcagcctgaatagcagcgtcgacttcttcaaccgttgcaaaaggcacgcggccaatcacttcttgagttgcagggttaacaatgtcttgccattcttgtgttttagattcgagaaactgtccgttaataagtaatttagcggtgtccaattcgattttctggattgtgttcataacctctccgtaggtcatatttttattgtgttcagttattagaaaatacttttctatgtatttcctttattcaggttttatttgagactaacaaagaaatctttgaccaccaacgcaaattcatgcacgattgttgtgcaaatatgcacagggacaataacaaaaatgaaagtggattgggatcatctacagttttttctggttttagcacgcactaaaactctaaccaatgctgcacgtattatcggtgtcgagcacagtacggtggctagacggattcaggctctagaacttgctttaggtactacgctatttaaacgtgaagcaaccggttatgagttaactctcgaagggatggctcttgtccctcgagttgaacaaatggaacaagctttcttacaaattgaaaaaccgcatcaacctttgcaaggtcgtgtgcgtattggcacacctgagggttttggaactgcatttttagcccgcttactggctgagttctccatacagtatccactgcttaccatcgacctgatacccgtcccaaaaatgattaagctctcgcaccgtgaagcagatattgtggtatcgattgaacgcccaacctcagggccttatatcattacgcgcttgtctgattactgtttaaaaatttacggtagccaaaactatctagcgcaaaacccaccaattcgccgactggaagatttaacccagcaccgctttgtgaactatattgatgatctggtgtatagccccgaactgtattgtctagaacgcttacctttaaagcttaacgcgaactttcgcagtagcagcattttggcgcaacaaattgcggtcagcgcaggcgcaggtcttgcaattttgcccaagtttttggcagatgataagcctgagcttgaagaggtgttagaacaacaggttcgttttacccataccttctggatgctgaccttcgttgatttacagcatgagccgcgcattaaactggtctgggattacttgcgtaaacaggccgataaataccaacatttactggttgattaaataataaataaaaagccaatcatatgattggctttctggtaaatcgagacaggttaattaaaagatttcttgacctaattttctcatacgcggtttatagaacacataataggtcacgcttaaaaccactaaccatactgggctaacgtatagcgcttttaaggtatctggctctaatgccaaaatcaccaaggtaaacaagaagaatgcaataacggcataagccatcaacacaccgcccggcattttaaaggtagatgctgcatgtaactctgggcgaattttacgataacgtaaataacacgccatgattaaaatccacacgctaatgaataaaatcacacagagcgaacttgccaaagtaaatgcttccattgtgtttggaacaaagtactgaagcactgctccgcccataatgaaaatacatgagaagattaagccatttgacggtacagcacgttttgataaacgtcccaagacactcggtgcctgaccatcttttgataaaccaaacaacatacggctcgttgaaaacacgccactgttcatcgaagacatgaccgaagacagcacaaccaagttcatgataattgctgaaatcggaatacctgcatttaagaacaattcaacaaacgggcttttatctgcacggatatgattccaaggcgtcactgacatcacgacaaaaagtgccagcacataaaacagaataatacgtaccggaatcgcgttaattgcttttggtaagttagtttgcggatctttcgtttcagccgctgtggtaccaatcaactcaacaccaataaaggcaaatacggcaatctggaatccggctaaaaatccacttacaccttttggaaacagacctccatgcgaccagacattactgatgctgacaacgtcaccatgaggagcttggaaatgagtgagaatcatgtagccacccacaccaattaagccaataattgccaaaatcttaatgagtgcgaaccagaattctacttcaccaaataacttgaccgtaagcaaattaagtcctaacacgaatagtacacagcccgcactaatcatggcctgttgcattggtgagaaactggcaccctcgggcaaccagaaacttaaataattaataactgctgatagatcggcaataccgaccaatacccagcctagccaataggtccagccaatataatagccagcccatgggccgattaagtcatatgccatatcaacaaatgacttgtaatgtaaattagcaagcagtaattcacctaatgcacgcataaggaaaaagaacataccgccaattaacatgtaaataacgagaatcgaaggacctgcgagggagatggttttgcccgagcccataaatagacccgtaccgattgcaccgccaattgcaatgagctgtaaatggcgattacttaatttccgttgtaaatgatcaggggaacttgcctcatctgaatgatgaaccattgtcatattagaagtcctttttatatttgcttaatttcaatcagcaacatatagggagaaaacgaaccgtatatcgtgggttgctgagtctatacatcgggacaagatgttcaagtatattttttccttaattgatctatcttttatccctatttttttaaattgcattatttatgtactgccttcacggcaattttaattatccaatctcaattcaccagatgagccgaagtgtagcatgcgatattgttcgatgtcgctttcccacccccttcaaaactgcactgatgactcaaaaataaacaatattattccgataaaaaacctaaagaaaataaaaaaagccaatcatgttcgattggctttttaataaaacttaatggtcgttgacgagttcacgtcctagtcttttcatgcgcggtttatacagcacatgataagtcacacctaaaatgatcaaccatactggactgacatatagcgcttttaaagtatcaggctctaatgccaagatcaccaaagtgaaaagcatgaatgccaaaacaacataactcatccaaatgccgcccggcattttgaatgtagatttttcatgtaattcaggacgtaatttacgatagcgtaaatagcacaccataatgagactccagacactaatgaagagaatcacacagagtgaacttgctaatgtaaatgcctccattgtgtttggaacaaagtactgaagcactgccccgcccataatgaaagtacaagagaaaatcaaaccatttgatggaactgcacgttttgataaacgtccaaatgctcccggtgcctgaccgtcttttgataaaccgaacagcatacgactggttgaaaacacaccgctgttcattgaagacatgaccgaagatagcaccaccaaattcatgatgatcgcagaaaccggaatacctgcatttaagaataactcaacaaacgggcttttatctgcacgaatgtgatcccacggtgttaccgacatcacaataaataacgccaatacatagaacaaaataatacgtaccggaatcgcgttaattgctttcggtaagttcttctgcggatctttcgtttcagcagctgttgtaccaaccaactcaaccccgacaaacgcaaaaacggcaatctggaatcctgccaagaagccttctgtacctttcgggaataaaccaccatgtgaccagacattactaatgctggcaacagcgccttgcggagcttggaaatggctgaaaatcatgtagccacccacgccgatcaggccaataattgccagaatcttaataagggcaaaccagaattcaatttcaccaaatagtcgtactgtaaggaggttaagacccatcacaaacaacacacagcctgcactaatcatggcctgctgtattggtgagaagcttgcaccatcgggtagccagaagctcaaatagttaataactgctgaaaggtccgcaatacccaccagcacccaacctaaccaataggtccaacccaaatagtaaccagcccaaggaccaatcaggtcatgagccatatcaacaaaagatttataatgcagatttgcaaggagtagttcacccattgcacgcattaagaaaaagaacatacctccaataatcatataaataaagagaattgaaggacctgcgagggagatggttttacctgagcccataaataggccagttccaattgcaccgccaattgcaatcagttgtaaatgacggttagacagttttcgttgcagatgatcgggagaattttccgtatctgaatgacgagccgttgtcatattaaaattcctttttgaattcctttgttaagatcagcaacctatggcgaaaattgaaccgtatgccataggtcactgaatctgttcaccaaaaaacgactggttaaaccgtatctatcttccttctgttagatacatcatcgtttttggagtaaaaacgaattacttttgtgctgccgtcacggcaatttcaattaaccaatttggattgaccaaatcggcctgaattgtggcacgcgatggagcaacacacccttttaaccagtcaacccaaattgcatttacggttgaaaagtcagaaagatttttcaaatagagctgcgcagagagcaaacgagatttatcggtattggctaacgccaaaagttcatcaattgttgcaagaatttcacgggtttgtcctgccacgtcttgctcggtatttttaggcacctgacctgacaaataaaccactttgttaaaaacagtcacggcgctcatgacttcgttagtgttaatcttttgtatatctgaattagacattcggatttccttatacctgattaataaattgaacacgggcggtgacagcacacatcagttcatagcccaccgtaccggatgaaactgcgacatcgtcaataggtaagacgacacctgtacttgattgaccccagagcaccacttcactaccaactttggcactctcaatacccgttaaatcgactgccaacatatccatactgacgcggccaactgtacgcgtgcgtactgaatccactaaaaccggagtacctgttggcgaaatacgttgataaccatcggcatagccacaagccacaattccaatcgtcatgggttgctctgcgacaaagtttgagccataacctacgctttcattcggctccaaatgctgaacggaaataatttcactacgtaagctcatggtcggctgcaagccccagtccgcaatactatgggttgggtaatctggcgagctgccataaagcatgatgccgctacggacataatctgatttgagctggtcttgataacgcagaattgccgcactattacttaccgatctttcacccggtaaatccttcacaatttcttcaaaggcagtaatttgataatcaataccttgctgaccgaaacgatcaccatctgcatccgaaaaatgcatcatgtgggtaatcttggcgacatttgccaaattatttaaacgttcccaagcctgcacataatgctgtggtttaaaaccaagacggttcataccactgttcattttcaagaaaacatcaaattgagcaggataaggatgctgttctacccactcaatttgcgcttcactatgaatggtgaaactaagctgatactgcacacaatcaaataaatcttgaggagaaaaaactccttcgagtaataaaattggacccgtccaacctagagcacgaattcgttttgcttcatcaagatcaagtaaggcaaagccatctgctgctttaaatgcttcataaacacgttcaattccgtgtccataagcattggctttgacaacggcaaagaccttactatttggcatagccttgcgcaccaccgccaagttattttgtaaggcttgacggtggatcactgcggtaataggacgaggcatgatttatttcctaacgtccgttaagccgcatgtgcgtgtgaataacgctgaattgaaaggccatcggtactaatatcagtcttatgattcaatacgatgtcactgattaattttcctgaaccacacgccatggtccaacctaaagtgccatgacctgtattcaagaacagatttttaaagcgagtcgcaccaataattggagtactgtctggtgtcattggacgtaaacccgtccagaaagatgcttgttccatatcaccacccgggaacaagtcttgagtcaccatttgcaaggttgcacggcggtcttcgtttagacctaaattgaaaccacttagctcagccataccacctacgcgaatacgttgatcaaaacgagtaatcgcaattttgtaggtttcatccagcactgtagattgcggagcaaaagcagggtcaacaataggaatcgtcaacgagtaaccttttacaggatatacaggtaactgtagatcaagcggtttcaagaaatcacgtgaatagctaccaaacgctagaacataacgatctgcagttaaaaccttgccatttacctgtacgcctttaatttgatcgccttcgacaatcaatttttctacgttctggttaaactggaaattaacgcccaactctttagcaatttgagctaaagcattggtaaataaatagcagtcgcctgtttcatcatttggtaagtgtaaaccacccacaagtttatcttgtgcatttgctaaagcaggctctacacgaccaagttcgttgccatttaataattcgtagcttacgccgcactcttcaagcacgctaatgtcgcgttgaaccgcttccatttgtgcttctttacggaatagctgcaaagtacctttggcgcggttttcgtagtgaatacccgtatcttttctgagttcacgtaagcagtcacggctgtattcagccacacgcatcatacgttctttgttcacagcataactttgtggattacagtttttcagcatttgcgccatccactgtaattgccacatgctgccatctaaattaatcgcaagcggtgcatggtgttggaacatccatttcacagctttaaaaggaattcctggtgctgcccaaggggtcgaatacccaggcgaaatttgacctgcattaccaaaacttgtttcttcagcaggacctgactggcgatcgagaacagtaacctcggctccttgtcgagccagataataggcacttgccactccaataacgccgctacctagtacaattacgcgcatttccattccctcacgcacaccagtttatttcactagtatatttctgcttcaatagtttatttcactgtttttcaggctataatctaggtaaatttatgtttttctcgcgagaattttaaaaaaagaggaaatatctatgcgccccttagatcgtatagatcgcatgattctggatattttgcagcgtgaaggacgaattgcgattagtgaattggcatcaagagtcaacctctctaccaccccctgttcagagcgtgtaaagcgccttgagcgcgatggcattatcatgggttattacgcacgtctaaacccagcctacgttgaccgtaacctgcttgtctttttagaaattaagttatctgccaaatctggcgatgtatttgatcaggtggctagagacttagttgagattcctgaagtgctcgaatgtcacctcatttcaggtgaatttgactaccttgtaaaagcgcgtttaaaagaaatgagtgcataccgccgcttattgggagatctattaaagaaactcccagcttcggcatcttcacacagttatgtcgtcatggaagaagtgaaagaaactctatatctcgatgtgagcaagtaaagcgagcattattgaactcgctttactcaccttttgaaaattagaaatattttaaaatcgaaatatgcttgttttgatgtttaaatttcgagaaccatttcaccactggatagagcacaaaagacagtacaatcgtaattagccacaacatccacacatggttgaccgacaaatagtttccgtagttagctccccacacactgagtgcgaacacatacatcagtttcaatacatataaatgcagtaaataaaagaacatcggcaccgaaccaaacacgaccaatggttttagaaatgaatattgctgtatacgttcaaaagcaacgagcacaagcaaaccaattccaacattcagcaaaataaacaataaagacggcggatacttggtgaggttaaaaaagctcatgaggctcagttgtaatgactcaaaatgttgccacgactggtcgccatagacattgataaaacgcagtaaaacaaataacccgatacttgctaaaccaaggctgagtaaagcgcggcttctttgctttgctgtatattttgaactaaagaactgacctaacgcatagcccaataaaatcacgccaatccaaggtaaaactggatagcttgtgcgaagcttgatgcctgcaatctcaatccaaccacgttcgtgtaaaacgaaccatatattctgtaggataccttgtgagaagtgcacagaatctaataagttgtgcccaaaaataatcaccaacgctacaccagcaagaacaggcaaaggcaaacttacacaacaagctagcaccaccatgctaataccaatcgcccagatcacctgtaagtaaatgacttcaggcggaaaagttgccgtccatgcaaagttcacaagggtaagctctaacacaattaaaaataagccacgctttaataaaaaagcacgtgtttgctgtaaatcttgtttttttgactgaaataaaaaagcagaaataccggttaaaagtacaaaaaccggagcacaaatatgggccaataatcgactgccaaataatgctggttctgttactgttacgtccattgggtcggtaacctgtttatgtaaatagaaagtttctcttacatggtcgagcaacataatgatgatcaccaaaccgcgcaatgcatcaattgactgtaaacgttcaatattcttttctaaagacatagcggtaatcaataaaataatgtaacgttatactattacatttaattccttttgtctttttatggctgattatttatgcgacacaaattaggattgttgtcttcgttaggtctatcatttatatcgacactcacttggggagaggaaacgtcaacggtacttgagaccatacgtgttcaggctgaaagtacccgagaagatgtgagccaaaatagctcggcaactaaatttactcacgatgttttagatgtcccttttaaccgtgcttatctttctaaacaaataatggaacagcaagacgtgcaacggattgatgatgcattaactttagtcagtggggtttttcatcaaaatagctttggtggtggcttttgggataactactcatttcgtggttttagtaccgaccccaatttaggtgcggctatgatccgtaacggtttgagtgttaaccgaggaattagcgctccaaaagatgtagtgaacattgaatctttagaatttttaaaaggaccaatggcggcgctatatggtcgcggcgaaacaggaggtttgctgaacctcaacagtaaaaaaccacagtgggaaagcgaaagtgaacttaacctacgtgccaatacccaagaacaatatcgaataagtctggagcatactgcccctattaacgatgaactggcctatcgtttagcagtggctcacgaagataatcaaagctttcgtgatcatgtcagcagtgaacgctggttcttttcaccacagctcacatggaaaatttcagaccaaacacaactcgactttgacagtgaatttacagagcataaaggaacctttgaccgcggtgtcagcacagtcaatcatcagtttgtgatggacccgaaaacctttacaggtgaacctgacgatggtgatttgaaaataaaagattacttttaccaattacgtcttagtcacgagtttaaccctgactggaaactaaatagtgcggtcagttataaagatgcacaaatggtcggctttgcaaccgaacctcgtcgtatgcaagccgatggccgcactctagagcgccaacgccgctatcgtgattatacaagtgaagatgtgctggctcagaccgagttacttggcaagattgatacctcatgggctcgccatgaaattttactttcaaccgagcttggtcaactcgactacaaacaaaaccagcttcgtcgcaaccacagcacggactcaccaaacacaattgatatttatcaacctgaatatggcaaatatttaccgaatctcactccgtttaccgacaccaaagagcgccagcgttacttcgcgcttaatgtacaagatcagttctttttcaatgaccagtggagtgtgttactcggtaatcgttttgatctggtcgaacaagactttaaaaatcatataaaacagaccgaagataaccagacacttcaccagaatagtccacgtttcggagtaaattttaaagcctctgagcaatgggcgttttatacaaactatggtcgctcatttgccatgaatagtggtatgaaccgaaatggacaaaccttcgctcctgaaaaaggcgaaagctatgaagtcggtaccaaatataaaataaacgaccaaagtgtgctgagtctcgctctgtttaaaatgaaaaaacagaatgtgctaacgacagacccgatcgacaaagactttcaaaccgcagctggtgaagtgagcagtaaaggagttgaatttgacttaaatagccaaatcactgaccgctggttcattaatgccaactatagttataccaatgctcaaattgaaaaagaccaagacttggcaaaaggcgctcgtctaagcaatgttccaaaacaccaaggctccgtaagcaccaattatgagattctacaagacggtgcaagaaaagcaggcgtaggtgccaaccttacctatgtcggtgaacgcagcggacataatcttgataatggctttaacttaccaagttatacgctggtcaatttaaatggctactatgcaccatctgaccgtttacgctatcagctgaatataaataacctatttgataagacctactatgtctcaagctatagcgatttatgggttcagccgggtgaaccactgaacgcctcaatttcggcacagtggaagttttaattcttctataaaataaaaaagcccgaatagtttcgggcttttcactagaacataccattttcattaacgagtggatcaggctgtatttgcccaatatcccaaaactccgcaatttttccattttcaaaacggcatatatgaaccacagctaaaattgttagcttgttattcatttgcatttccagtttagaatgtactgcaactaaagcgccatcttcaatgacatgctgaacttcaagaactttatttggagtttcaattgcactttcacgcatcccttccttcaaagaagtcttatcaccagcataataaggattgtgatgcttaaagtttggagcggtataattgccgtaggcttcatcgacctcgccagcagcagcaagctctaaaaaacgtaccgcaatttctttttgagataagctcattgtagaagctcccggctatatttaggctttactgtaaaatgtcatcttcttcttcgtcgaagacataagccatgcagccccacccatcatattcgccgttaaattgctcagcgattgtcgaaaaccactgctccagatcaacaatatccgaatactctggttccatcgtaacaaagatggtaatgatccattcattcggttcaacggaatcatcttggaaaagagaaattttttgctcttgatagagtaaatgcatcgcgcattgctctgcattttgctgatcttgaaatgcaattgaaaattcaatttcatgaagctcggttaaatcatccccgtcttcaaccatttgccaaagtacattgccgttatcatcatctggaaattgttcgtaatcgcggttcattagattgtccttgttgttgctctatttgtattattcggcattaagaataaccgacttttattgcagtttggatatgtattcagttgcgaattgcatcaaattttaattttttaaaaaggcacttgtgactcaatctccacatctgttcccttcaaaggatgttgaaaagcgagatatgcagcatgtaaagccatacgattcaaatgaaatcgtttaggttcaggatgatataacttgtcccccataatcggatgcccaatatgcatcatatgtacacgtaactggtgcgaacgccctgtcacaggttccagcaacacacgactttgatctgttgttgcatcataaaccaatggttgaaacaaggttttagcatgtttacctaattcaaaatgtacaatttgtcttgggcgattttcccagtcagtaatgagtggaacttcaacactgccctcttgttttacttggccttgtaccaaagcaatataatgttttttgactgttctggcctgaaacattttacttaccgcaacttctgcatcgcgatgcttggcaaacataagtaaacctgaggttgccatatctaaacggtgcgtaacctttgctaaagggaacttttccagcacccttaaatacgcactgtcatgatgttcaggtaaccggcccatgaccgacaacaaacccgcaggtttatcaaccacaattaaatcgtcatcttcaaataaaattgaaagcggatcttgtggtggagcgtaaacaaagttgtcgtttaaaggcatggtcgtagaaacagcaatggagcatggcggcaaatcataaagaaatttcagacctaccgcaaaataatctatagtgccctacttatgttccacgtgaaactcggaaaatctttatcgttttttattcatttcagctaaaagatcgagctgaatttcttgaatatgtgcaagtctttcccactgatgcgataaaagatggtccattttttcatgtaaatgacgaatctcaagctcggcttttaaattaatttgatagtcatgttgggaacgcaaacggtcttttgcttcttgacggttttgactcatcataataataggtgcctgaattgcagctaaacatgacaacactaaattcagcaaaataaagggataagggtcgacgggacggaccaccatcacaaccgtatttaaaacaatccaccccgttaaaaataaagcaaaacaaataagaaaagcccagctaccaccaaatgatgcaattttatctgccagtttttctccaaacgtccagttttgatcaaaatctgactctgtatttcggctaattaattcatgccgttgcatactgccaattacttcattttctaggttagataactcacccttttccgaccgtaatagggactgcacatatttaattcgataatctgctagatcggcccgacaaataaagcttgagtaactccaatctggatggtcttttaaaatttcatcactaatcacgttacggatgacttcaccagatactaaatcttttaaaggaaagctctttccacatacggcgcattggcgacactgatttttattctccatattatccagctcgcaattgatcataagattagtatataaacgattttgattgatcgcatcgtaaataaaaatagtgctctaacctaaaatctgtaaagtcgctgaaactatttttcggtgggcagaaatcacaggcttcatataatgagatttaaatgtcaggagtagcacagaaagattaggcttattcataaattatattcttgtaaaatatcatttttattattgagaattttttagggtgtcaagggaaaacatctatggtttacttcaacaatcataactttgtaagttataaccttgtgcctataaacttttgatctatagcgtcctaagccgaatcgagaccttttgggtgagtacacactaacgttatacgtttcggtgcatgctactcttttcgatccctatcacacccttgagatatagtttagccagcaccctgcgggattgtttttctaagaaaagcgaatttttattatttttgggaatttttacgccattaggcaaatttaaaagaatatattcccatttacctataattagttaaatttaaattccattttatttgtatttttcggtttattttaccaagtcattaattattttgagcaatggtccatcagactataaaagtaaattacccttcactttttagctgtgaagggcaaaattcttttataaagaaataaaaccattcttacgggcttggtaaacggtacataaagcgataagggcaaaagccagcataaaccacggaaaagaagccgccccaaaactttcaagcagtcccccgccaatcattccaccgaatgcgatagcaaggttaaatacagtgaccaacatagattgagctacatcggcttcgtgacccgcagtatttgccaaagctgtttgtaataaggttggtgcaccaccaaaagttattccccataacacaacacccgtcagtacactaaaacttgaagaactataaacacccaagagcgctgttgcgattgcaaagataaataagctcaaaagcgttatttttcttaatgaacgatcaataaacatacctgtaatgagaatgccaacaattgaagaaatgccgaatataaaaagaatggtctcaactttgtatgaatgccctgttgaagccaaaaatggtgaaatataagtataaagaatgctatgcgccaatatccaaaggaagacgactgctaaaacagctctaatgcccggcattaaaagaacttttaaaataggcaaccttttctgtgcagattgtcccgcaaaatcaggaatactaaaacgaatccagacaaataaaatcaatgccagtaaagacatgatccaaaacacaccacgccattcaaacaatgttcccaaccatgcacccaaaggaactccaattgataaagcaataggctgcccaactccagcgattgctaaagctcgtccttggtaggacgcagggaccatacgtcttacataacccgctaaaagtccccatataacacccgcagccatacctgcaatgaaacgagcaatcaaagtcagaatataatcatttgataaggccgtaattgcattaaataaaagtaaccctgcaatagcactgagtaataagggtctccgattccaactacgggtgaggctaataagcggtattgccgctaaaacagaacctaaggcatacactgctataagctgccctgcataagcttctgaaatgcgtaacccttgactgatttggggcaaaagccctgctggcatggtttctgtcataatggtcagaaagcctgcaactgtaaaagccaacaatttccaaatcggtaattgagtagagaattcatcagttaactgatgagatgtttcattactcttagtattcataaagctttactctcaaattcgcttgcagcgtacttactctgctctgtatcgctataagcttgttttataaggttaggataggaaggcatttgttctccatgtgaactaaaatcattattttggaatggacgttccaatttaagttaaataaaaaccttaactattcagctcaacaatagttaaggtttaaatgagttttataaaatgtttaaagcaacctcgaccacatccattaaacattgctttctttgttcatgaggactgcctttccctaaaacacgtaaaccttgcatcgtatttagaaagaaacttgctaatgcacgtgggttttgggtagaaccaatttcaccagattgttgagcttttattaacaaactctccaaagcatgttgaagtttctgtaaattacttacaacgaattgagagacttcttcgtcatgtccagccagttccaaacaagcatttgcaacgaggcagcctttatgttctgaatcattcaactcatcttcaaccaccctcatcagtaattgtcgaataagtgcttttgctgaacctgaaccagacaacagctttatattattaagtgtagttaaaagttcatagcgttgtaatgccttttgataaagcccttgtttgttttgaaaggtactgtaaaggctacttctagataatcccgtaccatcaaccaagtcttgaactgaagttgcagcataaccacgacgccagaagacctgcattgcagcctcagcaatttcatcagtttcaaattctttggttcgcatacacatgcctaataggaacgatcgttccaattaatttatgatataccaatacacaagtcaaactaataattcttctatcaatctatgtttagccaaataactcatgtaaagccgacttattaatcccgcttttaagtatttttattctttgcgtactattcttagagataacttttgcgcttgaatatattataaaaacatattataaattatttctaaccaaataattggttttttggaactttataatgaacaacaatattataatttttggttatggaacaggtatttccaaagccgtagcacataagtttggtaaagaaggctataaaatcgggttagtggcacgaaacgcccaaaaacttgaaaaggctattctagaacttaaagcacaaggcattgaagcttacgcttttgcatgtgatttagctgttcttgaagatataccaaatcttattaaacgtattaaagatcaattaggagagattaaaaatattcattggaatgctttccatgatattgaaggcaatattttagaaacccctccactagaacttactaaaagctttcatattcgagtttcgagctatattgcgacggtacaggcttgtttaggtgatttagagaagaaccacggtagcattttatcgacaaacggaatttttgctttcgatgcagtgggcatcgacttggttgccaaagaatattcatcgttagcaactaccgctgccgctcaatacaaggccactaacttacttgctcatagtcttgctgactcaaatgtttatgtgagccaagtgattgtaaatggtttcgtagatggcagacctgaagccaaagataaaacctacacggtacacccagaaacagttgcggagcagttctggtacttacaccaacataaacaagaaacagtttctctttgtggagaagccattcaagctgcttaaactatttctgatgtgagaagaagcgtaatcagttacgcttcttacaacttattgtacataaggccaaatatctgggtctatatagctctcatctatatggtaaccctcttttttcatattattttcttcagttttacgggcttttttattattagcaacttcagtttcaaatgcttgctttaactgctctgaattcatcttatctgaatcagagatagcatttcgccctgcatatttaaagttttcaaagctgtacctcaccatatactgttcttttttatcatctttataggtccgtcgaagactaatacccaactccacatccccattatacaaattaaataccaacctatttgttttcgaaagcacatcctgccattctttaaaatttaagatataagttggatctataacctcccccatagtttcagtcatatgctttagattatcttgtttatcaattcgagcactaaaaggtaaaaaatactgcttccattgtttgtcattaatctgatgtactaatttagtataagcagtataagcctcttggctcgtagtatattcatttggatgcaagctagcattaatgtccatgatttgaataccatcattgcttcgtcgagctacttgtgtacctagcacactgattacattttcaatttctaaattactcttttcactaaatacacgcactcgacctagtttcggtggagtccaatctaatgataaaaaattcatccctgcaggctgacgatcaactggtgtagtactatttttactaaaatcttgcatcccttgttcaccaaaatgaagggctattacatcttgattttggttcatcgacttatttccttgggtagtattatttgcgggtttacaagaagttaaaaaaatacatgtaataatgcagataaataaagataaatagtttttcataataagtttccagctctgtctagcatcaaaccttcccctcattactactcgaatgtattttaaaatcggctttactatttccccatttagaaatagttttcaattcttgttgtaaaaatggccgacctttttcatcaagcattaaacggtgatatttttcagctgctttaccaatccatttcatacgactatcataatcttcagcaatcgtacccttaagaggagcaatataaacatcctcttttaattctactaattgatcagctttactacctgtataattaccaaaccaattcttttttaccgcgtctacactataatcacttgatagaacaagtgtggcatctggcatacctataaaccaacgttgcatccatgcaccaaatttaactgagcaattttcccaaacaacgacttgaagaatattatgttgttcctgtaccgcaatagccatcaaatgatcgaatagattttgactcgcttttctatatttacttttctcatcacgtccattcaaaaaagctttctcaatggcaggtaatagagtaaaagcatcattaatttctttcgttacctttaaatttttaatactaggtaaacacgatgaccatggcaaattcattaatgctggtttaacaaatttgaaagtactagtatctcgcgtacctttacaactcttaaaagattctgaagatgcactccaagctaaatgccaaggagcaatatccataaacaaccacaaattgccacgagcaaaaagatttatagcctcttgtacaccgacattatagccaagcagactcccccaatgcttaaatatagttgcaactgtttttgaggcgaaagctcctaagcccatccaataatatcgccccaaaaggttcttattcccaccgagctctatttctaaaaatattttggcatatacggaggcaattcttcttgctcttgcctcatatcctggctcaagtttatagttattcgctttttgtaagttagataatctcttgatcgcttcttgctgatatatttcccaaaatgtcaaacagtcacagtgagcatccttacaactatgttcacttatgttcgttttactgttccaatccaaactgttagacatttttacttccttgcgctggatctacccaaacttcagtctcatctactgtttctagatctaaccataacaaatcgagcttaagctcctgttctttgggactatgtatttctttggtttgacctttcttatctgagttagcaaaaatttctttaccttcagaagatatcttgtaatcaataaatgaaaggggctcacctgaaggtaatagcatcttgaacctctcattataggcttcgtaagcgggtaacccttgaaggttcatacctacctcagctccccccataaacaaatgctgtccagccttcacctcaaacttgccgcttgtggtcataaaaatacctgaaccggtaattttgacttgagagccgcctgcggtaagaacaatttctttggctgcggtcgcttcgattttgtcttcagtcgaaatcacctgaacagctttacgggcaattaaatcagctccatcgccttgcgcctgtatttcgactttacctttgcctgcatacagtcttgccccttgttgcgctgcaaaaaggctaatcttattttgggcatgtgcaattaagttcttttgagtagacagattgatgctatctccggcagtttggttgagctgaccatctgcacttaagtgaatgtcttcgttactggctagagcaatactgttaggcgcagttaatatcatcaaagcttgcttaaaagcagcagctttgtcttgatctttctcttcaatttgctctatgaacgtttttaagttctcaagcatttccaatggatcagtttgctgatttttagcaacttcactaagtgccttggcattattgaggccgccttcgatttgttgcttggcctcacttgcatcaaggtgtacaccttgagcctgatcctgtttgtgggtactaatgagtaagccgctaccagctcgaaccgcgccccactggtcagttctgagttcaaaaccttccccacgaccatcactttctgccttgtcttttggatggcttaagttacccaagtttagctggctggccgcatggctactttgtagctgggcactgatttggcctgtggtgtcatcaaaacggagctgattaaagcctttgccatcaacttcttctgaacgaatgccgctgagttttttagtatcaggtaactgccctttctggtcgaattgcgttgggtggcgttcagcttcatgaatacgccccaccacaaacggacggtcaatgttcccgtcaaagaagtcgatgaccacaatttcaccaacacgtggcaagaaacgtgcgccataacctgcccctgcccatggggtcagcacatcgacccaagcggagtcagtgtcattgtcgttacttccagctccaccatcatggctgtggtcatcagctcgggtaaacaggaaacggactttaatgcgtccccactggtcgacatgaatgctttcaccctctaaacccaccactctagcgcgctgtgggtgagcggctggtcggtgctctagcggattatattcaggcacagctttgatgttacgacgaacgacattcagctcagcaaagtggcgctgctcagggttttgactgtcgagttgggctgccttgagtttgccttgtggtaataagcgctcaagttgctgttgtaattctttcggtaaattattctggttatagtagtgtttgcttaagattaagaactctttatcagcactgtcatgttggtcaagttctgggtggtcattgagttcaaaccagtaacccacttgtgcatcacggacgttgcctgcaacggtaaactgtttagaactcaagtgatggtaagcattgatgtgctggttaagctgttcaatctggctatttcccgaagcggtggcttgatcttccccgtttagatcctgcatccacgctgggctaacatgccatgcatcttcaaggttcaggcttgcattgtcatagtgttcgctgtgcttttgggtgccttgtacgctgccgctaccttcttcttgttgcaaagcatcggcttgccagcgttgcacatgaaccgaggttggttgtaaacgacgctcagctttgacttgggtaatggtatcaaactgttctgtcgcactgctgcgttgatagcggatgctacggcgttcaagtgcctgataattttggttatcgtcaattaaacgcaagacttgtggctggatagaagcatttgggtcagcgacaaaaagctgtgactcatcgaccagccagttaataccttcactacgccacaaacgggttaaaaagtcataatcgctttcgtttgactgcatcacaaatggacgcacatcgtagtctttagttaagccagatgtatcgagcgttatgcttgaggcaaataacgggctttttccctgccattccttaaacagaatttcactaatatcgcgcacgcttttattcataaacacgcgactattacggcgcttatgccagagtgcagttgggtcttttaaagttaaattataaatagtgagtgagccatcgctttgcccttggctggcttcggtaataatacctgtcgttctaaaaaactggcctgtatcggtgacctgatcgacggcaacctgacagccaataaactgttttaatgcaatatgggcgttcgtcgacagacacaataactcagcaacgctgccctgattaagcgtatgttcgccttcaatacgttgtaagaagacttgctgatttaaagactgatttgagaattggatatgaacagcacgattttgtgaaacaaggcctaaacgttccaatatactcgacacactcatctgcatttttattatcaatcaaacttatatttaagccatattttaattaaaaaaagactaatctgtctatctatactcattttcaaaatgtaactagtctaaatatgcagttttacgttaatttcttattaaataggtatttaaaccgtaaaattcgatcattttaaagtactataaatcatggagatattattaaatttttcaaataaaaatcaaacatatagcaagaaattaaattttaagattaataaaattcaggataagatatgaaaataaaaaagtctgctttttatatatttaccatgattttttcgcttcattcttcagcatttgctgagccgagtgttgctgatgttcaatatcgtgcacagcaaggacaaccgattgcgcaatatcatcttggcatcatgcttttaactggtgaacaaggtgttgttaaaaactatgaacaagcttttaaatggttaactgctgctgaccaaaatggcagcgtgggggcaaaatatagtttaggaatgatgtatttcacgggtacaggcgtagaaaaagacatgaaacgcgcttttgaatattttgctaaagctgcggataagggccatgccaaagcgcaatataacttaggggtgttatatgtcagaggtgaaggaactgcgcaaaattatgagcaggcttttgaatggtatagtcgtgctgcagagcaaggctatccgcccgcagaatataatttagctcatctatataaaaaaggtcacggcgtcgctcaaagcgatgagcaagcccttaagtggtacaccaaagcggctgagcataatgaaagcgatgcccagtacaacttggcccagatgtatttaaatggtgaaggcatgccgaaaaacctacaactggcaaagaaatggttccagcaagctgccgatgcaggtgattcggatgcgaaagaaatgcttaaaagtttagaataaggtattaaaatttaatgtttgtctagctctaataactcactaatttcttcaccatatagccatttatttaaaataccttctgaactttctaagcctacaatatctagaaaactttcaaatgtagttgccacttgttctcgatcttctgtatccaatttgtcaggatcgatttgactgattccatgagcaaggacatgtaaaagttctgctttagttggttcattcttttgttgatagagagcaataaaagcttgcgcagtatcagccactttgcgatttaaacttatagctaatgcaggctcttgaacacccgtatatagctgtccatctccagcaaaatgatcttgtgttttaaacttttctaattgttgaataacaatagagttagagttagagttttgaatattcatttctgttttattctcagtttgttgggcacaaccagcttgtgaacttaagacagccatgactagaaccaaaagctttttcatagttttattacttttatatttatctgcatccaatataaactaaattaattatgattttccatatccatgaggttttattttattatttattttttctaattaaacattaattctattattttaaaaacatatttatttttattattaaatcaaaaatattttaaatattaaattgacgtatttaaaatcaccgattattattccgttgctggcctacattgccagacggttttgacagaccgtaactcgtagcgaattgtagttctactataattcgttagacccttgcgtcccctttctttgcggtaggacgggagggggacgccccgcgcgtgctggttctacgagtccagtctgtcaaccccctttcgttctaccaccctaattaattcgcggtaatctggtggtagaactccattttttaaggagttgactatgccatttttcaaactcattttctctcttatttaactattttattaatttaaaatttgggtttttacgccctattttttaaatttatagattatttttattttaaaattttaattattttattttcctgtatttataggaggattaacttttatttaaaaattattttaatttcccaagcaattatattttttattttagttatacgtataaatactcatgagaataatatgaaaatttataaaccctttttggctttaagtttcatagtcggtagcttaggtgtggcaggttgtagccttcatgcccaacaggagtttgaaaaaatttgtctgtcaggtgggcatagcgaggccagttgtgactgtatttaccagcaacttgaaaaagcttattccccgaaaatgatgcagcgcctagaacatgtcagtttgcaaagtcctgttctcccacgggactttgcccctacttttttaagcaccatgcagcggtgtgacaaaagtagtctgggctaagcgttggcttagctctttatctctgtgtcgcaatggtgttgtactttaaatcagcgcaaaaaattaaagtctgttgtggcacagaggcctaaagatgaattcaaaataagataaataaaaggcgttcttgtacgttttatcctacaaacttttaaggtttttgcggattggcgacaccctacttttttcctaatatgaagtcatacaggaacaggatgttccggaacataaaacaacaataataggttcatgcatcaggatcgtgagatacgacaggagtcatatctagtacccaaatacgaaaaagcccaacaggatgttgggctttttttatatctgaatatttatgagtttttctttaagtcttcaatataagtggttgtgctgccatcccagtaacaatgtatacaacgtccctcttcaaaaatatgctcacaatttgcatatccataaattatagaagcgcattcaggacacaacgaggccatgctagatttactttttaaatactggcttccgcattcatcacatttttcacaaccactcagcatggatatatctcaatttaaaacaacgctatgagaacataatgataaattaaaaagcaatcttgtacgttttaacctacaaacttttagggattttgcggattggcgatgccctacttttttcctaatatgaagtcatacaggaacaggatgttccggaacataaaacaacaataatacgttcaagcaccaggagcgtgagatacgacaggagtcatatctaatcaccaaatacaagaaagcccgacaggatgtcgggctttttttatagtcatttaaaaatgattttacactcacctatagcggggtatgtgcctgttcttgctttttatggcgaatccaacgcaccacccaaataactgcaatcagtactactattgcaacaagcgcaggcaccagcatagctgaaactgaaagtaagattgctccaatccactcccctgtcgccacaacaaagttccctaaaccacctgtggttgcagttgaaacaccacgtgcagcgacggtactcatttgcaccacacctgccgtaccaccaccgacaataatggctgctgcccaactggcaaactgagacatttctccactgctaaccgccattgtcgctaatgtacccgcaatcatggccgcaggggtcgcgactgtgtctaaggcattatcgacccacgggatatagtaagctgcaacttcacacaccgttgccacgcctaaagccaaacacaccgatggcagagctaaccactcaaagccttttgatggctcaaaccatcccatcatggtggcgatgctcatgaccaatagcggtacaaacacgcgaaaaccgcaggcagcgctcaggcccacaccaatacataaacccaatattgtttccataacggtttccttctttatgcccatcacgggtcttgttatgtaagtcttatttttaaattaacaaaaagccccatcgggtgacagggctttttgttaaatgcgaacgcaaatattatttcattcttaacgtttaaattgcgtgcagtagcattttgtgcaaggtggtaaagggtcggtattaatttctaaaaacactctatgtccgcactgagcacagaaatagaagcctgttccgggtttttcgccagctgttaccatgattacattcctataatcgtatatatattaaacaggaatataacccagttaaagtgaatgtcaattgtccatttcgcccgatgatgatggcataaatgcaaaaaatgttatttgtacgatttatcttacacagatttagggatttagcggattggctgtcccctgctttttttctaatatggactcatacaggaacaggatgttccggaacataaaacaacaataataggttcatgcatcaggatcgtgagatacgacaggagtcatatctagcaaccaaatacgaaaaagcccgacaggatgtcgggctttttttatacgataaatcactttaaagaaaatacattcgaatcaaatttgccgcaataagcataagaataatagctgttaaacctgtcaacaaattgagtagtactttagcgatatttgataagtttgatttatagatcttaacatttataccataagcacttgctccaagagctccgccaatagcacctccaaccaacataagtacgagtggccagccacataatagatgcgctttaactggcaacttcctctcagcttgattatctaatttatttgttgtttccaatttttgatccttttttatatggatatttatctaaaaaatctattttaaatgcaattttttatgaggctatcaactctttttacacaatgtatagtaaaaaaccccatcatcaagatagggctttttttgaacaatatcaataatgtttaactaaaatattaagccacttggccttctaaaaagtcttgcgcaaaacgctgtaatacaccgcccgcttcatatacagaaacttcttcttctgtatctaaacggcaagtcacaggcacttcaagaatctcttctttaccatccgctgtggcacgttcaatcactaaagttaaagtcgaacgcggcgcaatattaccaatcacgctataaagctctgtaccatctagctttagagtcttgcggtttacacccggtttaaactcaagtggtaacacgcccatacccaccaagttggtacggtgaatacgctcaaaaccttctgccacaatcgcttcaacacctgcaaggcgtacaccttttgcagcccagtcacggcttgaaccctgaccgtagtcagcacccgcgataataattaacggctgtttacggttcatgtaggtttcaattgcttcccacatgcgcatcacttcgccttctggctctacacgcgcttttgaaccttgcttaatggtaccgtctgaacggcgaaccatttcgttatacagtttcgggtttgcaaatgttgcacgttgtgcagtcaagtggtcaccacggtgcgttgcatatgagttgaagtcttcttctggtacgcccattttgtgaaggtattcacccgcagccgagtccatcaaaatcgcgtttgaaggcgacaagtgatcggtggtgatgttgtcacccaaaatcgcaagcggacgcatgttcgccaaagtacgtggtgcagccaacgccccttcccaatatggtggacggcggatgtaagtactttgcggacgccaatcgtaaagcgggctcttcgcttgttcaacttcgcccaagtcaaacattggaatgtagactttacggaactgttcaggcttcacggcttgcttaactaacgcatcaatttcagcgtcagatggccagatgtctttgaggtaaatcgggttaccttctttgtcataacctaacgcatctttttcgatatcaaaacgaatcgtacctgcaattgcatatgccacaacaagcggtggagatgccaagaacgcttgttttgcataaggatggatacggccatcgaagttacggttaccagagagtactgcggttgcgtacaagtcacggtcaataatttcttgctgaatagcaggatctaacgcaccagacataccgttacacgtcgtacaagcgtaagccacaataccaaaaccaagtttctctaagtcttttagaacacctgcttcttcaaggtaaagtgcagccgcttttgaacccggtgcaaatgatgatttcacccaaggtttacgaaccaaaccaagttcattcgctttacgtgccaacaaacctgccgccacggtgttacgtgggttagaggtgttggtacatgaagtaattgcagcaataatgattgcgccatctggcattaagccatcagaacggttttcaactacacccgcaatgcctttttcttttaggtcgctggttgaaacacgtgcatgcgggtttgatggaccagcaatgttacgtgtaactgtcgatagatcaaaacgtagtacacgtgggtactctgctttggtcatttcagatgcccaaaggccgatttcttttgcgtactgttcaaccaatgccacttgagcatcttcacggcctgttaggcgtaagtagtcgattgtgttttggtcgatgtagaacatcgcagccgtagcgccatattctggagtcatgttcgaaatggttgcacggtcacccacagacatactgtcagcaccttcaccaaagaactcaaggtaagcaccaaccacacgctctttacgcaagaattcagttagagccaacacgatatctgttgcagtaatgcctgcctgacgttgtccaaccaactcaacaccaataatgtctggcagacgcatccaagatgcacggcccaacattacgttttcagcttctaaaccaccaacacccacagaaattacgcccaaagcgtctgtatgtggtgtgtgtgagtctgtaccgacacatgtgtctgggaatgctacgccatcacgcgcctgaatcaccggagacatcttctctaggttaatctggtgcataatgccgttccccgcagggatcacatcgacatttttaaatgcagttttggtccactcaatgaagtggaaacggtcttcgttacggcggtcttcaacagcacggttttttgcaaaagcgtctgggtcagcaccaccatattccactgctaaagagtggtcgacaatgagctgtgttggtacaactgggttaactttagatggatcgccgcccttctcagcaatcgcatcacgcaaacctgcaaggtcaaccaatgcagtttgacccaagatgtcatgacacaccacgcgtgcaggataccaaggaaagtccaagtcctgacggcgttcaatcaactgcgttaaataagcagttaagttctcggcatcggcacggcgtaccaattgctctgcgagtactttagaggtgtaaggcagtttttcgtatgcgcctggctgaatatcttcaacggcttgacgcacgtcgtagtattcaagctgggtacctgccagcggtttacggtattttgtgttcattaaccacgctccgccaatggtttaaattcgaggttttcagggcctgtgtagttcgcgcttggacgaataattttgccgtcttggcgttgttcaattacgtgtgctgaccaacctgctgtacgtgcaattacgaataatggtgtgaacattgcagttggaacacccattaagtgatagctcaccgcactgaaccagtcgaggttcgggaacatgtttttcacttctttcatcactgcttctaaacgctcagcgatgaggtacattttggtgttctcttgcgcttctgctaagtcatgcgccactttcttgatcacttcgttacgtgggtcagaaactgtatatacagggtgaccaaaaccaatcacgacttctttattttcaacacgtttacggatgtccgcttctgcttcatctggattgtcgtaacgttgttgaatcacgaatgcaacttcgtttgcaccaccgtgcttaggtccgcgaagtgcaccaataccgcctgtaattgccgagtacatgtcagaacctgtacctgcaaccacacgtgacgtaaatgtagacgcgttgaactcatgctcagcatacaaaataagtgaagtatgcatcgcttgaatccactcttcacatggtttttcgccatgaagtaagtgcaagaaatgcgctgcaattgagtcgtcatcagtttcaacttcaatgcgacgaccgttgttgctgaagtggtaccaataaagcagcattgaacctaagcttgccattaatttgtcagcaatgtcttttgcgccagcttcattgtggtcttcatgttctggcgttaaacaacctagaactgaaacaccagtacgcatcacatccattgggtgtgcagacggtggtaattgttcaagtgcagttttaagtgctgccggtaaaccacgaagtgcttttaattttgctttatatgctttgagttcagctttgtttggtaatttgccatgtacgagcaagtgagcaacttcttcaaactcgctacctgccgcaaggtcaagaatgtcatagccacgatagtgcaagtcgttaccgctacgtcctacggtacatagtgctgtgttgcctgcaacttgtccgctaagtgcaactgatttttttggtttgaagcctgttgttgtttcatttgagctcataagattgtcctttcctatctatctgaatttatttattaagcacgatggagtcgtaccattttcacttcttatttctttttagcaaatgcgttgtctaagtagtcttcaaacgcgtagtagttaatgcgttcatataactctttacgcgtttgcataatatcaaccacattcttttgcgtgccttctttacgcaaggtttcatacacagtttcggctgccttgttcatggcacggaaagcagaaagcggataaagcgcaaggcttacatcagcagatgccaactcttcagtggtaaatagtggtgtcgagccaaactcggtaatgtttgccaaaattggtacgcctgtcttctgagcaaattgcttgtacatatcaagctcggtaattgcttcagggaacaacatgtctgcacctgcctcaatgtaggcacccgcacggtcaatggcagcttgtaggccttcaaccgctaacgcatcggtacgcgccataatcacgaagctgtcatcaccacgcgcatcgaccgcagctttaatacggtcaaccatttcttcttgagtcacaatggctttattcggacggtgaccacaacgttttgcacccacttggtcttcaatatgcattgccgcagcaccaaacttgatcagtgcttttgtagtacgggcaatgttaaatgcagaagcaccaaagcctgtgtcagcatcgactaataatggaagatcacatacatcagtaatacggcgtacgtcggtcaacacatcatcaaggttactgattcccaaatcaggtaagcctaaagaaccagctgctacaccaccacctgataagtaaatcgctttataacctgcacgttttgccaaaagtgcatgattggcattgatggttcccaccacttgtaatggcttttcttgggctacggcatcgcgaaatagctgacctgcggattgtttagccattgttatgttctccttgtgcttgtagcagtgtttgctcaataattttgtaagaagcattgatatgtcgatgcatgagcagctcggcaagttcaccatcgccttctgcaattgcatctaaaatacggatatgttcgtcccaagctttgctcggtcgatcgggtgtgtttgaaaactgaattcggtacatacggatgagatgataaagctcatcacatagcattttttctagggttttattgccactacttttgataatgcagtagtgaaaatcgtcctgcccttcttgcaagtaatatcctttacctgctttaaagttttcatcttcggcatgcatacgcaatacatcacgtagcgccaaaatttgctttttatcaatatgctgggccgcaagtttgcaagctaaaccttctaatgacgcacgaatctggtaaagctctttaaactgttgcagtgagagcgaaaccacacgcgcgcccacatgtgcagtacgctcaaccagtcgttgaccttcaaggcgatgaatcgcttcacgcaaaggcccacggctaatgccgtaagtgcgcgccagttcaggctcagaaattttgctacctgccggaatttgacctaaaacaatcgccgtctgtatttgcttaaatacatgctcggtcagtgttcttccctgactttgtaatggctctggtgcgaaggtcaaatcttgcatattgtcgacaatttttaatcaattatgagttttatagcgggatgaatgaaaaaaatcaaggtgattgttgacacttttcagaacgcatcaggtcaatttttatcgttcggcctgttacctcaccttatatttaaaccattaaaccacttacaaattagtctttataaaacatatatttaatattattttacctatagatttatgatacttttttagttgcttttcgaccgctaatcttttgtttcaaactttagtctacaaccaatgtattacagtaagattgtagacaatctgcttgaatgaaagcatgagttagaaattagtttctatttaccgtaatttcttttaaatctttttatcattttcatccagaaaatatcgatattagtgaaattatcaggtgcttcacggtagctttattgatacattattgagcatcgacatagttgtggcgtatttttcgagacagaaaaaacccagcactatgcatattgttgaatgaaaggacttttttgatgtttcaacatatccccccatacgcaggcgatccaattctctctttaatggaacagttcaatgctgatactcgttctgaaaaagtaaacttgagtattggtctttattataacgaagacagcattgttcctcagttagagaccattatcgaggcacaaaagcgtattgagcctaagaacggtaaaaccaaactttatttgccaatggaaggcttcaaaccttaccgtgaagcaattcaagcacttttatttggtgcaaacagcccagcagttaaagctggccgtgctgtaaccatccaaacgcttggtggttcaggtgcattgaaagttggtgcagatttcttaaaaacttatttcccaaattcagacgtttgggtaagccaaccaacttgggataaccacgttgcgattttcaatggcgctggcattaagactcatttctacccatatttcgatgcagaaacgcgtggtgtagattttgacggtatgctttctacacttaaaattttgcctgagcaaagcattgtgttgttgcacccatgctgccataacccaacgggtgctgatttaaacccagcgcaatgggaccaagtaattgcagtattaaaagaccgtaaccttattccattcctagacatcgcttaccaaggttttggtgacggtatggaagaagatgcgtatgcaatccgtgctttagaccaagcgggtctaaacttcattgtgagcaactcgttctctaaaatcttctctttatatggcgaacgcgttggcggcttaactttcgtatgtgacgatgcagaagctgctcagtgcacattcggtcagttaaaagcgactgtacgccgtatttactctagccctcctacaacaggtgcttggttagttgatgaagtgttaaatgacgctgaacttaaccaacaatggcaaggcgaagtgaaagagatgcgtgagcgtattatcaaaatgcgtagcatcttgaaagatgaactcactaaagcgttaccagaccgtgactttagctaccttgtaaaccaaaaaggtatgtttagctacacaggtctaactgctgagcaggttgatatcttgcgtgaagaatatgcaatctacttagtacgtagtggccgtatttgtgtagcaggtttaaacatgaacaatgtttacactgttgctaaagcaatggctgaagtgcttgctaaatcagtcgaagcagcataaatcatctattaaaaaaggcgcttcggcgcctttttttatgtctcgatattaagatttagccttaccccaatatttcagttttgaggtatggccaatacccacattaaaactgttggttgggtcgagtttttgatagaaattggctaatgcaggtttggcaatgtaaaggtgcccaacattatgctctgccggatattcagcacggcgcgcatcgagtaatttccacatttgatgttccatttctaacgggtcattaccctttttaagaatatagtcctgatggaacacatgacaaaagaaatgcccataatagagtttatggatgattttcttttccatctcggctggtagttgctctacccattcacggtcattacggcgtagcgcaatatcaagcgctacaatatcttcaacttcactacggtgcgtatcacgataacgaattgccgcccctgcaatcgcaaaacggtgtaagaacgcctttcgcccctcttcttcgctacatacgaaatagttgcctgactgatgcactgcaaaatattcttttaaaaactgctcggtctgagcttttgaattattttcaacacgtaacactaaatggtgctcataacgatctcgatattcggtcatacgcttaggcaaatgactcggtaaaaagaaggtaatcgcctgtaaaatctggtctgttaaacctttaattttaaatttttctaaaaagccatcgactttatctttcatcgcaaaggcttttggaacattggctgtaccaaacttttcaataaataagaaggtgtcttttccgtacttttcaccaatcaagtaagcgtctcgatgaatatattcacccgcaattggcaagcttggcagtgaggtcagtaagtagcgacgaatagccgttaaatcatcggcatcattactaccaatataaaaaacactgctctctactttttcataggtatcaaggcgtacagcaaacacacagaccttacctgccgaacccgaggcttcaaacaaacgtgacgggtctgcattaaaacgagcaggcgtatcttcatcgacctgagtcacgtcgtacgcatagcgatggtccgatgcctgcttttcgttgtcatctaaaatatctacggcttggtattgctgcttctctaaacgagtcaaaatttcttcgggtgtcgagcctaaattcacccctaaatgattcaccagctctaattgaccagcagcattgacctgagcatataacgccagttccgtatacgcaggaccacggcgtaccagtgcaccaccagagttattacacacaccgccgagtaccgatgcaccaatacaagatgaaccaatcaccgaatgtggttcacgattatagccttttagaatttgttctaaattatctaaggtcgcacccggtaagcagatcacttgcttaccgtcatggatgacttgaatcccctttaatcggcgcgtgctcattaccaaaacaggacggtcataatcatcgccatacggagttgaaccaccggtcaatcccgtattggccgcctgcataatcacaatacagtccgcctcaattgcagcctgcaacacttgccattgctctagcaaagtccctggtacaaccactgcaagcactttcccctctccaaaacgacgaccttgacggtactgacgcgtactttggtcatcggtcaaaacataagaacgccctacaatattctgtaaatgttcgattactgcttgaggagaaaatgtttgcatgatggtttccttttggtcatccctaccacatagttttttaaaaatcagaaaagctcaaaggagtttttccatttagaactaatatttaaagtagctaattccattacttttgttttggcaaaagtaatcaaaaccattgtcacttacagaacctattcgctgtatccatttttcaatttacattgcaaaaacaaaactttgctcataccacgcaggctgtaagtgacgcttagcactagcagctaatctctaggtgttagatttaattcaaattggctacgcgttggcggcatggatgccgcctgttgagcaactgtacaaggaagtacggtttgctcaacaaaaggtttttggttacttttgacctttcaaaagtgacaaatgcctatataaaacattagcaaatcaccaaattttaaggctgtgcttaccgcttcacttactatgtcttaaagaccttgtttaatcgcctgtactaaacaatccgcattaatatccgaaatcgacttagcacccgtgagcgtcatcgcaacacgcatttccttatcaattaaatcaagtaagttcgacacaccttgtccacctgctgctgccaaggcataaacaaacgcacggccaagtaaaactgtatcggccccaagcgccaacatacgcactacatctaaaccattacgaatgcctgagtcagccaaaatcgccaaatcacctttaactgcgtcggcaattgcaggtaatgcacgagcagatgacatcacaccatctaactgacgaccgccatgatttgataccacaatcccgtcagcaccaaaacgcacagcatctttggcatcttcaggatctaaaatgcctttaatcaccattgggccatcccaaaattcacgtatccactcaaggtctttccatgaaattgatgggtcaaagttcgagcctaaccagccaatatagtcttcaagcccagtcggtttacctaaatatttagagatattcccgaggtcatgcggacgtcccattaagccaacgttccatgaccagtgcggatgaaatactgattgcatataacggcgcatcgcagcatttggcccactcatacccgaatgagcatcacgataacgtgcacctggtacaggcatatctacggtaaataccagtgttgaacaacctgctgcttttgcacgttccaaagcattacgcataaaaccacggtcacgtaacacataaagctgaaaccacatcgggcgattaattgcaggtgcaacttcctcaatcggacaaactgaaaccgttgaaagcgtaaatggaataccttttttatcggctgccattgcggcttgtacttcaccacggcgtgcatacatacctgttaaacccacaggagccaaggcaactggcattgacagcgtttcattaaacagttttgtctctaaactcaacgcggacatgtcattcagcacacgctgacgcaatgcaatttctgacaaatcttgtacgttacgctttaaggtatattccgcatacgctccaccatcaatatagtgaaataaaaatgggggtaagcgacgttgtgccgcagcacgataatcattgccagaagaaataatcattttgaatcaactctatttaaacggtttgcacgtttctggcgagcttcgtcttcatccagagaacgcacatgattaatcacaaattcaatatgaccgcagacagcttggcgtgcggcctcgggatctttacgatcaatagcatccatcacctgaaaatgctgctcgctgagcaagtcaccatttacggggtcgttataaacttttttacgccctaataagacgttgtattgcagcaaatcaaatagacttcgcatcatttgaatcagcaccacattgtgagatgcttcagcaatcgctaagtggaattcagcatccgcgaccgcagcctgtgctgagtcacctgcattttggtggcggctaatttcattaaaataatgatgaattttggcgcgatcttctggggtcgaacgtaacgcggcataccatgcagtccccccttcaagtaccaaacgcgcctcttgcacatcaaaacggtataacggatcttcttcaatcaggttactaatcgggttcacaatcagttgctgtggccattgttcaggtaattgctgaatataagttccatcgccacggcgactaatcagtacaccttgactattgagctgttgaattgcttcacgcaaagacggacgagaaactcctaagctagttgcaagctggcgctcggcaggcaaacgatcaccttttttcatgtgacgctcttcaattaatgcctgcaatttcatgaccacttgatcggagattctcatcgcgtttccttcactggagttatggaatcatccacggcaccagataagcctgaaccgtaataatgatgccaacaaagacagtgaatatgatgctatgttttaccgtgaaacggaacaagtcagattcttttccaactaaccctaccgctgcacaagcaatggcaatcgactgaggagaaatcattttacctgtcacaccaccgctggtattagcagcgaccaataacacttccggaataccaatttgctgagctgtagttgcctgtagtgccgagaacaaagcatttgaagaagtgtctgaaccagtaaggaacacaccaagccaacccaaaaatggcgagaagaaagtaaacgcatgacccgtatgcgatagagccaaagccaaagttgcagataaacctgaatagttcgcaataaaagcaaatgccaacaccataccaatcgagtaaatcggtgtttttaactcattgagcgtttcaccgaaggttgttactgcctcacttgctttcatttttaagaaaataactgtgatgatcgcagcaataaaaattgcagtacctgttgcagagaaccagtcaaacttataaatcgcttcgtatggtttcatctcggacacaatcggtggcattttctcgaccaatttgtgtaaatacggcacttcaagcttaaaaatccagtgttcaagagcgccatcttttgcaaataatgctttaaatggcttaacgctccagatcgtgaccattaccgttaaaatagcaaatggagaccatgcctttgcaattttcccaatactataacgttgaactgttgtaggttgctgagtcaaagtctgacccgcttcaggttcaaaacggaaaatatgttttggtttccaaacacggaataacaacgtcaggctgaccaatgaagcaattgctgcggtaatgtctggtaactcagggccaataaagttagaggtgagatactgagcaatcgcaaaagcaccaccaccgaccaataccgcaggccaagtttccttaacaccacgccagccatccataatcgccataatccagaacagcacaataatggttaaaaaaggcaactgacgacccaccatctggctaatttccatagtgtctacaccggaaacctgccctgccacaataattggaatacccattgcaccgaatgcaactggtgctgtatttacaattaaacataaaccagcagcgtaaagtggcttaaaccctaaaccgacaagtagtgcagcggtaattgcgacaggagcaccaaagcccgctgctccttcaaggaaagtaccaaatgcaaaaccaacgagtaacatttgcagacgttggtcttcggtaatagatagaatgcttgagcggataacttcaaactggcctgtttttaccgaaatcttgtatagaaaaactgccccgataatgatccatgaaattggccatagaccgtagaagaaaccgtaaatgattgacgcaaaggccatttgaccaggcatttgatagaaaaatagcgcaatcagtaatgcaataataactgtgcccgtacccgcgatactgccttttaaacgaaaaacagccaaggccaaaaagaagaaaataatcgggattaatgcaaccgcactagacagccaaatattatttaaagggtcataaagttgttgccacatattgagcattgtcatctccttgaaatgccggggcgaatttttgtaccttaaaatttcaacatttaacacaattggtatgaccaattaaaatttaagtgcaaatgctattccttaaaccacaaggcgcatcataaacacagttattggtaagatcaatggttaaataattgtcataattggtatgaccaatatagccaagaaaaatcaagccatttctcatctataattttttttattcgactaaagtcgtaaaaagcttccttataaacttaaatatgacctacagaaatgaagtatttgaatataaaacaataaacataaccatttattggtaaatgtataataatgcccaaaacttaaatcatttgtattgaactgaataatgactactttaacctgttttaaagcttatgatatccgaggcaaactcggcaccgaattgaatgaagaaatcgcctataaaattggccgcgcttacggacaaatttataaaccaaagacggtggttgtaggttgtgatattcgtctaagcagtgaggctttaaaacaagcgaccatccgcggtttaaatgatgcgggtgtgaatgtgtttgatttaggcatgacgggtactgaagaagtttactttgccgcttttcatttagacgtacaaggtggaatagaagtaactgcgagtcataacccaatggactataacggtatgaaattggttcgagaaaatgctcgtccaattagtgccgataccggtttaaaagaaattcagactttagcagagaccaataactttgaagaagttagccaaaaaggtacaacgcaaagctataacattttgcctgagttcgttgaccatctactgacttatattgaacctacaaaaatccgtccattaaagttagtggtaaacgcgggtaatggtgcagctggtcatgtgattgatgctattgaagaaaaatttaaagcacttaacgtaccggttgaatttattaaaattcatcatgaagcagatggtactttcccaaatggcatccctaacccaattttaattgaaaaccgtgacagcacccgaaatgctgttcttgagcataaagcagatatgggtattgcatgggacggcgactttgaccgctgtttcttgttcgatgaaaaaggtcagtttattgaaggctattatattgtcggtctattggctcaagctttcttgattaaacagtcaggcgaaaaaattgtgcatgacccacgtttagtttggaacacatttgatatcgtagatgaatataaaggtgttgctgtacagtcaaaatctggtcatgcgttcattaaagacgttatgcgtgcacacaatgccgtatacggtggtgaaatgagtgcccaccactatttccgtgattttgcttactgtgacagtggtatgattccttggttactcaccattgctctactctctgaaacaggacaatctctctcaacactcgttgaaaatatgattgccaagttcccttgtagtggtgaaatcaactttaaagtagccgatacgcaaactacgattcaaaagattttcgacttctatgccgatcaaaatccacaaattgaccgtaccgatggggtaagcctcgactttggcacatggcgttttaacgtacgcgcctcaaacactgaacctttgctacgcctcaacattgaaagccgtgcagaccgtcaagctcagccaatgcagtattatatagatgagttgacgggtttaattcagaactaattaaaaataaaaaaggagcaaatcgctccttttttatccgaatctaattgtagccattaggattctgcttttgccaattccagctatccttaagcatatcttctaaaccgtattgaggtttccagtccaactcagcaactgcacgagcattgtcagcaaaagatatcgctacatcccctgctctacgtggagcaaactcaaaagcaacaggtacgccattcacttgttcaaaggtatttttgacttgtaaaacagatgaaccattacctgtaccaatattccatgcacggcaaccttgcgcctgtaaacggttatttaaagcgcatagatgtgcattcgccaagtcaacgacatggatataatctcgcacacctgtaccatctactgtgtcatagtcattgccataaatagataatttttcacggcgaccaacagcaacttgagtcacataaggcattaaattatttggaataccttgtggatcttcaccaatacgcccacttttatgtgcacctactgggttaaaataacgtagtaaagcaatagaccatttagagtcagctactgaaagtttttgtaataattgctcaacaattagttttgtatatccatagttattacttggcatacctgttggcatttcttcatttaaaggagaggtatttgcttcatcatatactgtcgcagaagagctaaatactaatgtataaacaccagctttctccattgacttcaccagttgaatactgcccgcaatattattatcaaaataaataagcggtttttcctggctttcacctactgcttttaaacctgcaaaatgaataaccgcatcaattgtatgctctcgaaacactcggtcaagctcgtcagaattccgaatatcaccctctataaaagttaaacttttttgagtgatctcttgaactctatttaaagactcttctgagctgtttgagagattatcaaacacaataacctcataaccaacctgcaaaagctcaacacatgtatgtgtcccgatataacctgcacccccagtgactagaattttagccatctacctttcctaacaatattttaattaacccccgtgtcgaggcatcaagttttgaaaaatcattttgaacaccatttaaaatgggaagtaactgatcagcaatctgtttacctttttccaccccccactgatcaaatgggttaatgttccaaatcacagactgaacaaatactttatgttcatataaagcaatcagcattcctaaattatacggatttagctcatctaataataatgtagaacttggttgattaccttcatattgtttataaataggtaaattctttaattcagctgcatctaaagcttcattgccaaaagccaataaacgtgattgtgccaaacaatttgataatgcaaggtgatgctgctcaatcaatgcctcagcattctctacataggtaaagtgatctgcattataacgttgaaccggtgcaataaagtcacagcttactgcctgtgttccttgatgtaagagctggtaaaatgcatgttgtgcatttggaccaacctcgccccatacaatcggacaagtatctaattcaactttttggccatcacgttgtaccgacttaccattagactccatttcaagctgctgcaaataagcagcaaaatactttaatcttccgtcataaggtaatactgcatgggtctgaatatttaaaaaattattattccagataccgagtaatgccatgagaaccggtatatttcgctcaaagcttgtattttgaaagtgttcatcgacagcatgtgcaccagctaaaagctgctgaaaaccatctataccaatcgttagggctataggaaaaccaatacaagaccaaagagaataacgcccccctacccagtcccaaagtagcaactgattatcaggagcaataccccactcagtcattttttcagcttttgtagatacaccaatgaagtgactttttacaacacgatcatgctttcctaaagctttttcaagccactgacgaactgtttgtgcatttgataaggtatcaatggtaccaaatgactttgaagaaataataaataaagtcgtttccggacgcagttgatggagcaagtctgataactggctaccgtccatagttgaaacaaagtgtacattaagtggtttggctgtttttactttaaaatcagctaaagcatgagtcaccatgtgcggccctaaatcggaaccacctactccaatattaacaacatcctgaatcacttcacccgtagcgccacgatattgcccagcatggattttttcaaccaaagtgtacatacgctgtaattggatatggacctgttttgcgagctccggaaatttcgaatattccgagggtaaacgcaaagcccaatgcattgcttcacgctgctcagtacaattaattttatcttgcgaaaaaagacgattaatccactgtgttaattgtttattgtttgcgagagcaactagttgttccaaaatatttttggtaatacgttgtttgctataatcaaaaaataactgatcaaattttacagaataattttgaaaacgttctggctctaaagcaaaaagctcttttatatgtagttttgagtttttctcaactgaagacttaagctgtattaaaggtgagcttaaatcctttgggaattgttcaattgatttactcataagcgtccaactccttcgtaagcaaaacctctagcctttacatatgctgggtcataaatattacgcccatctaaaattaaaggatgcttcattaactgttgtagtcgcttaaagtcaggactccaatattgtttccatgcggttactaaacataaagcatgagcattttgtgcagcctcgtattgatcactacataaaataagatcttcccgagagccatatattgaggcaatttcatctagagcctgagggtcatgtaaacgtacttttaccccttgcgcccataacgcagccaataaaatatgaatgggtgagttatgtatatttgaagtattttctttaaaagaggctccccaaatcgcaacagttttaccactcaagtcacagtgataataattccataacttccggaacaaaatttctttctgttgctcattaatagcccagacttgctccaaaagtcggctttttgttcccgtttctaacactgcgcttgaaagtgtcaaaatatcatgcgaaaaattctcaccgccaaatcccacacctggtgataaatatgcggcaccaatacgtgtatcagcagcaataccatgctttacatttgcaatatcaataccgagtttttcagcgaccatcgcaagatcattcatatagctaatacgagtagctaacatgcccgaaatactaagtttggtaaactcagcatctaaaatcggcataaataagtattgataactaaattggaaaaaaggacgcaacaattcctgcataatttcacttgcgtctctagactctacacctacaatgacatgttttacatctagtacactattaattgcattaccttcttgaatcacatcagggaaatacacccattcatctttcggcaaatgctgttttaatttctctgtaccatgtaaaccaaaagtagagccattaatcattaatttaggatgaataattggccgttcacttagtttttcaacagtttttaaagcaagttcaatttgtgtaggactaaaacaaaataaataaacttcgatatctaaaggaatttcagaaaaagggctttctttcaagaaaccagcttttcgctgtttgtttaaataatgatttacttcttgatcttgatacgaaagtacagaaatattttcttcacaacttacacaggtacaccaataaatttgattaccatattcagccaataatgcggccattacaccggcatgtaacgtcgttccaaatactgcgattttcattgcacacctgattctttagtattttatagatttctcttccttttacaggaagagaatatactgctctgtttttatattcattcgtttttacaaatacttaagcagagctacaaaactttataatttaagttcttgaatcagctgtttaaattccattcctaattttggatgttctaagccataatgtaatacagcttttaaataaccaagcttactaccacagtcaaacgtttggccttgcatacgataagcttcaacagtatctgtgtcttgaagcattgcaattgcatcagttaactgaatttcattacctgcacctttcggcgtgttctcaagtaattgcataatcttggcaggtaacacatagcggccaaccacagataggtttgatggtgcagcgcctactgcaggcttttcaacaataccctgcatggcaatactttcacccacatttgggctatgctttacatcgacaatcccatattgatctactaaatggtctggcactgcctcaaccatgatttgagcagcttggcttgagttataacgagaaatcatacgagataaatcattttgtccagagccatcttttactagtacatctggtaatagcactgcaaaatcatcttcgccgacaacactctttgcacataaaacagcatgtcctaaacctaaaggttgaggctgtctaacacttattacacttacatgctcaggcacaatttgtgtaatctctgcaagtaagtcgaattttttcttttgttctaaagtcgtttctaactcaaagttcctatcaaaataattttcaattgaggctttcgatgaatgagtgactaaaataatttgctcaattccagcctctacagcttcacgtactacatattcaattgcaggacggtcaactactgttaccatttctttaggaattgacttacttgctggtaaaaaacgtgtgcctaaaccggcaacaggtaaaactgcctttttaatcatatgagtagttacttactattataaacttgctttgtcttcatcacgcgctgaaccagaaaagcggcttgcacctactaactgatctggagcattaattccttcttttttcaacataaccaagactgttttcatcataattttaaagtctaaagataaattatgggtttcaacatactcgatatcaagttcaaatttttcttcccaacttaaattatttctcccacttacttgagcaagacctgtcatacccggtctgacttcatgacgacgcatttgtcgagaagtatagtgttctagaaagtcggctaactgtggacgtggacccacaatgctcatatcgccttttaaaacattaataagttgtggcatttcatctaaagtggttgagcgcagcttatgcccaaatggagtaatacgctcttcatcaggtaatggattaccctgtgcatcaaatgcatctttcatagaacggaacttaatcattttaaataattttccgtcttttcctggtctttcttggtaaaagaaaaccggagaacctaaatttttacgaaccttatatgctacccaaataaagattggggacaaaatgattaatgcggttaaggaaattacgatgtcaactatccgtttcatcatgtattcactcttattttcaatgggttttcaaagaaaactaaaaaatatgcaatagttagcatctgtctctcacaagacgatttatacaaacatactatcatagattagatgacgtaacttttaccttatgacaaatcgtactttaatgttacttatgtattgtctaatgaaatgaagcctctctttttacactattgtaattaaaaaacccaaaaacatataaacaacttattgatattaaaaatatttttttatttcgagtttctctaaattattttatttttgataatttatatccttgtatttccacatttttgaacaaaaagaaacatttctttaaaaaaatatagcttcttttatcagtttaataaaaaaatgattgtgaaaaacctttaaattataaaaagatatattcattaatttttatgttctaactgtcctgcattaaaataaatagctaaaattattaaaggaaaatatgcgattattaaaccgactaatggagaaattgctttatttaatacaaaaaatgcacaaggtaagagccatataagattaatgattaaaactgctaaagttacgggtgtatgactatcaaaatacctagcagcgtattgataagcgtggcttcgatgggcttgatatattttctcccctcttagtattctccttataattgtaaaggttgcatctactataaaaactcctagacaaatgatccaagctagaaataacttaaagtctatttttaaagcatataaagctaatacagcgaataaaaaacctaaaaaactactacccacatctcccataaagattttagcttttggaaaattccatacgagaaaaccacagacaatagaagtgattgcaagtaatataaaattattgatgtcataccaactgtataataaagctagacttagcccgactgatattgcttcgatacttgcaatgccattaataccatccataaagttatataaattaagcagccaaaccaaaaaaagaatagcaagaatgttggtaaaaaaacctaagtttaaattattaaaaacagagacttgggcaaatccatctaaactaaatacgataaatgttgcagtaataaaatgaatgcttaaacgcaacatagaattgatatgagcatgatcatcacaaaaaccaaggagagcaataagcaaacaactcccccctataatgaaaaaatcattcaaacttataaactgagatatatagctatataataaagccattagaacacttatcactattgctactccaccaccacgtggtgtgggcttcacatgtgaacttctaaagttaggtaaatcaataatattttttcttaaagcatattttcgaacactaaaagttaatacaaaagaaataagaaaaagaatgatgaaagatataataacattcatatcaaacctattactttttgaacatcaattttaagctctcatcaaagctaaaaggagctctccatcctaatagttctatattctttgaggtgtcaacgatcaatacagaacaaagtcttgaagcgacagcactcttattaagaagtttagctaaaaaattaattaatactttaggtataggtacagcaataagatttctaccctgaattttagctaacctcgtaaataattctttaactgttatatcgtcttgatcactaattaaaaaaacctgattttttgctaaaggatgtgataaacaaatattaatgaaatcgcttaaattataaatactgaccatgcttcttttattatcgaggcatccaacaggtaaaggaattcctttagccgccagattgatcatactattaaaatttgccttaacatttggcccatagattaaagctgggcgaataataactacctccatcatcgagttttgcgctaaatttaatagagattgttcagcttcatattttgataatccataaggatctttaatatttataatattgtcatgaggagtaaaaggtacttgatcactcacttcaccatttactttaatactactcataaatataaatcgttttacaccagctttagctgcttttttagctaaattcagtgttccttctacatttacttttctataaatagataatggatcactttcagcttccttcataatatgagcacgtccagcacaatgcacaatgacatctactgagctcaagtccaaagaagttagatcatcatttatatcaaaagttatagtctttatgttattacataacttttgtgtatttttacgagtttgagccagaacactatgttctggcattgccgtaaaatattcacataagtatgaaccaacaaaaccactacttcctgtaatcaagatattcattttaaaaaattaaattcttaagtaaattttctaataatatttagaattttactcattgctactttttctgaataaaattcatttaatacttctcttgatgaattgaatgcatagcagtgttttgctaacacaatttcatcaagttgttttgccaaagcctcttcattattaggtgggactacccaaccgatatgatgagtattaatcatatctgctacttctgactcactatccataattgctagcaaaggcttatctgccgccatagaaaaataagatttactaggaacccctaaacctaacatcccatcagccaaagtaatcaatgcaacatcacacgcatttaaaccagttgttttttctttctgatctaaagatccataataaagaatattttgagatcccaaagactgtatttgctctttaagacgagcaacatatgcaccatcaccaataaaaatgaattttgccaaatgtgcatatttcattttctgaatagcatgcagaatattttctacgccttgtacacgaccaatattaccgaagaattgaaaaatcgtagtttcactatccaaccagttcaattcttgtaaaattcggttattagttttgggctctgtaccaatatcagatgagtcaatccaattctgcactacagtaatattgttactttgatgcgttttttgatgtactaactctttcatatctttgccaatgacaatgacctcatcagcacttgcataaatcctatcaaataaactttttaagattttaaataaaaaatgatctttttttaaaattttagccgctgctaaattttcgggaaatacatcatggactaataatatccatttaaaatttagaaattttttaataataaataaaacgaaaagcagtaaaataggtgtcgtacctgtaaaaacgatactatcctttttcactactttcaaagtcttcattaaaaaactaaaagcgataattagttcatataaaaatcttttaaacaaacttgccttatttggctttttagctttaataaagtgtgcatttgcatgttgaggacaattcatgtcctcttttgcaataagaacaaggtctatatcactttgtacattcaacgtgtcatacaattttcctaacaagtaacctgtcgtattttgatatggatgataatattccgtgattaaatagaccttcttcttcactgctttaacctcaatacttcttccaaatcactcgatttacataatctgtgtaactcataatgatacgcacaactttttcactcacatttggcatactgtagtcttcaactaaacgcaaaagacgattttcgcctctagtttgaccttctaaaattgccaaaccttgtaaaatgcgttccgctttcaaccctaccatcattacagccgcttcttccattccttcgggacgctcatgtgcttgacgtaaattaagtgcagggaaatttaagattgatgattcttcgttaattgttccactatcagacaacgcagcctttgcagaaagctgtaacttgttatagtcgctaaaacctaaaggttttaacaattgaattaaaggatgaaactcaacatttaactcttcaatacgcttacgtgtacgaggatgtgtcgatacaatcacaggatatttatatttatctgcaactgcatttaacatttctaccaaatctaaaaaattctgatctgagttaatgttttcttcacggtgagcactcacaataaaatattcatgctcttttaaatttaagcgttcaagtacatcagaagcttcgattttcgctttataatgatgaagcacttcgaacattgggctacctgttttgattactaaatcagcaggcaatccttctgctaataaataatcgcgagcaatcgtactgtaggttaaattaatatcagccgtatgatcgacaattcgacggttaatttcttcagggactcgcatatcaaaacaacgattaccagcttccatatggaaagtcggaattttacgacgttttgctggtagcactgccatacagctgttagtgtcacccaaaacaagtagagcctcgggttgcacttcttctaaaattttatcaactgcaataattacattaccgattgtttctgcgcctgtcgcaccagctgcatttaagaaatggtcaggtttacggatacccaaatcagtaaagaaaatttcattcaattcatagtcatagttttgtccagtatgaacaagaatatgatcaaaatattcatcacatgcagccattacacgagataaacgaataatttctggacgtgtgcccaccactgtcattaattttaactttttcacaaatctctactcttaatttgttattggcatcgcataagtatctggcttattacgatcaaaaatttcattcgcccacagcattactaccatctcttcatcaccgatgttagtaatatcatgtgtccagcccggtactgtctctacaattcgtggttcatcaccatgcgtttcaagctcataaaattcacctgttacaatatgtttaaacttaaatagtgccttacctttaataacaaggaacttttcagtttttgtatgatgataatgaccaccacgagtaattcccggatgagcagtaaagtaagaaaattgcccagcatcgggtgtcttcaacatttcaacaaatacaccacgagcatcaccatatttgggaacactgtaatcgaattgttcaggctttaaaaaactcaaataagttgagtaaagtgctcgagttagccctgttcccacccgatctgtaataagtgtgtctctagatgctttaaatccatttaaaacttttgctaaatcacctacggtaatttgatattcaggttcaacttggaaaaattgttcaacttgttgcccattcagaatattccagaatgtttcaactacatcgtcgacatacacaagacgaatcacagcattttcatcatgaatttgtaagggtaagtcatttgcaacgttatggcagaaagttgcaacagcagagttataattagggcgtgaccatttaccaaaaacgttggctaaacggcaaatataaactgggttaccttgtgcttgatgaagagtgaccagtgcctgctctccacctagcttacttttaccataaggattatcacgctcgacctgaatagacgacgataaaataacaggcgttttcttattagcttgctgcaaaatttgactgatcttttccgttaaagtggtattacctttagcaaattcttcttcatttagagggcgattcacacctgctaaatgtacaatccaatcagcagctaaaactacttgctcaaactcttgatctgttgtttcacgatgagcttttaaaatctcaacttcaggtttttctgataaaaactgaataaagttttttgcaataaaaccattagaaccggtaactaaaactttcatgcttacgcctctggtgaaatatattcgcctcttgttaatgcgcgaacaaaatcaagtttaagcaataattgtttcataccctctacatctaaacgagtagtattatgcgaattgtaatcttcgaactcagtaatttttaagtcaccatcttctacgtacttttcatagttcaagtcacgctgatctgctggtacgcggaaataatcaccttggtcaaaagcatgtaccatttcttcacggcttaataaagcttcgaaagctttttcaccatgacgggtacccataatagaaataggatgatcttcaacatttagtaattgtttcaatgcttcagccaataccgcaattgtagctgcaggagctttttgtacaaagatatctccattttcaccatgttcaaaagcatatagaactaaatctaccgcatcttctaaagtcatcatgaaacgagtcatgttcggatctgtaatcgtaagaggtttaccctgacgaatttgatcaacgaataaaggaatgactgaaccacgtgatgccatcacattaccataacgagtgccacaaataaccgtatctaaaccctcaaggttacgtgactttgcaaccataactttttccatcatggctttagaaatacccattgcattaattgggtaaactgctttatcagtacttaaacacactacacgtttaacatggttttgaatagctgcttcaagtacattttcggtacccaatacgttagtctttacagcttccattgggtgaaactcacaagatggtacctgttttaaagctgctgcatggtaaatatagtcaacaccacgggtagcatttaaaatactgttatagtcgcgtacatcacctatataaaattttagcttcgctgaatgatatttcttacgcatatcatcttgctttttttcatcgcgactaaagatacggatttctttaatatctgtttctaaaaagcgttttaaaacagcattaccaaatgatcctgtaccaccagtgattaataaaactttatctttaaacatacttgtcctctcccataattttagaaaattctttgctaatagtatttgctgcatcattccaactctgaggcaacattttagcctctcgatatccttgctggatcaactgctcatataaactcggattattgtataaggtaattattgcatctttccatgcttgtggtgactcatgatcaaccacataataagcagcctctttacataaatctttagcatatgcaagattggaggtaatctgtggaattccccaaaacattgcttcaatatgagatgagctcaatgattcaattagacttggcataaccgcaattttcgaagacttatataaagattctagttctttgggctgaacccaacctagacaaattaaaattcctttacgatgtagctcggttgtcaagtcaaaatcgatatttaaacattgctcatatgttagagtaacaattaattttaaattaggtatttcattattgaataaatttaaagcttttaataataataaatgtcttttgtagggatagtcagttgcgacataaataatattaaaatcatctggatttatttttttacaaccaatatttttatcattagataaattattactaatacctactgatttttttgcaacgacagttttagtattatgaaaattctttttaactaatttttccataaatggtgtttgtaatatagttaaattagtatatcgcatactaagtctaaaaaagaatcttaaaagactaactctaaatgagccactaggatgtatttctaataaattagcgtcacaaacttggaaagcattatttaaagataatacatgatatgccgaagttttaacatatggtccaacattcattgaccaaataatatcagcagaatatttctctactatttttttaatttaaaggtaaaaaatattaatctaccaatttcacttggcaaattactctcaactatatattcataagtgagattattataaggggtttcaatttcactaagcacagatgttttattacaaacgattacaaaattccaattaggattttgtaatattattgcttccaacatatgcttaatattaattaaagctccacctgaacctttataatattgaaatactatattcattttcactttaatcttctaaaaaactctaataactgattactatagactttattactaagttttaactcaattgtttcttggcattgctgttgcatatatttatattgattgttttttaaaacatcacctagaaattttgcaacttcattaatatcgttaacaatacatgcattttctccatgttgagcatacaaagtaatatcaccaataggattacagattactggggttgccatagaccaactttccactaacttagtaggaaaaccagcgtgggcataacgtttatcatctctaaacaatacagaaaaatgagatttactatatagatcaattacatcacttctcgacagccgaccatgacattttatatatgattgaattctatcaaagttttcacttcctagaagatcttttaattgagagaatgttacgccagctatattaaataaaattggacaatttaattgttgatgtaatgttggaagatagttaataaaatcaataatattatccttttttccaagattaccagcatatataaagttaataccctgctctatcgatggcttttcagcagccaaatggcaatctaatacaattggtaaaaccatttgatttatattaggccgatgacttttcttggaataataattatttaaataatgactaattgaaataatattaggaattttaggatatacataatgcatgcgtataaaattttcaattgccggaagaccaaatctacccattggtaaatgactactatcataccattctgtagaatctaaaattaatttgatattatactttttacacaaagatatcagtttcaatgtaaataaagcgggcggattatagactactataatttcaatagtatccttcttaaaataattttcaatccaatttaatgttctctcacctttatatataaaagatccaaatttttccaatagagtagttgaattattatctaattcagcttgtggaaaacatttaatagagttatgcaaataaaattgattatctattaaagatttatttttttgctcccacccacaaaccaatatttcatcataatagggcttaagaatattaatcatattattaagccttaaagaagctgcatccccatcaggaaatcgaaatgctccagtaaataaaattttagccatgatttgttcctttatagaacttctaagattgagagaaaaatataaaatattctactaaatataccctgaaccaaaattaataatattaattaaaaattcaatagatttcatagaaaaatataataggattaaaatcaataaaggatcaagtggttttttataataaacaaacgcaccgataaaaacgaaaaaagcaaagatagccactcgttctacatccaatacaaatgaagcagctattaaaggaataccacataatagaactttaaaatttttactatataaataacttaaaataataaagaaaattgtttttataatactccctaaagaccccccttctccactatatgcttcaactttatgagaaatatgctcactaagaaaaaagagaaaaattccacctacaccgagcatcgaaataataatagcaattttcaaccataatttttttaattttcttacttcaattaaaaatacataaaatgaaaagaagaaagattgtatatgaccaaccatagctaaaaaataatataaaaccttatattttgaagtagcaagtaaatataagagtacaaatattacaccaaatttaagtctttcagcagcaaataacaaaactatagaataataattagttaacaataagatgcttaaaatatttctagtaaagcttactttataatatttaaaaatatttgcacataaaagataggcaaacacagcattcgaaaaaataatgaatatatttctatcaactcctaacttattcataacccacacaagcccaaagtataatggctcttgggttcctagtttagagttataacactcaaaagaatcgacactcggataaaaacaattatcataaaaatcaatataaaattgttgatccccatatatatagagaggaacaaaataataagaaataatcaatattaaaaatgcatacaataaagaatacatttttcccttttgcaccttcaccatataaacacctgatttaaaaataacatatttcaaatttcatccaaaattcatttaataatattttgatttttcatttcttttaaaacaaaaaataaaatacctaaaattaataaaagactataaataaaatatataacagtataacttttaagaatttcaaacacgtcagatatgcctattttctctcgaaaataaagaattattgccacgattgctataaaaaaaatatccattattaattgatatttttgtagatgtttatatcttattacaactctaacatatatagttcccataaatacaaaagctaaagttataatataaaatccgaaatcagacactaaattccatgtgggagtttttattaacaaattaattatataatgaccacaccaacctaaaaaaggagcaatagctattatgaaaccacctaatgccgttgcttttaaagttaatgactttacttctaaattattaattttagtaatatgaaaatataaagcgttagtacaagatgtagatattaaaattataggaggccaaacaaggcgggatataaaactatattgccctatataattattattcccattaaagatataagaaaatataactataggcccataaaaaataaatactgacgttagctctaatattgaaccgtataagctatatggtctatatttcgtaaatatattttttatgggaactttaaataaagagcgtaaactaaaacttggtaaatcaatactttttttaataaaataatgtaataacccactatatattacttcacctagcaataaaccataaattaatccatttatagcagtactaaaagacaaggccgcttgagatataactattacaagagctcggatcacataactagttgataacctagtgaaattccctgagtaaacaattaaactacgtaatgtattagttacagcagtgatacttgctaaaaaaattgctaaaattgaaaaataatcaatattaaatagaccatatagtattaacaaaaaagttgtaacagcaaaaatacacttaaagtttaaaactattaaatcatttaataaaaattgatttttttcaaaaggaattgctacatatagttgaaggctaataaaaactgtaagggctgtactataagcctgtatcgtaccaaaaacaccaaattgttcaggtgtatatagaaaagcagaaagtggaaggaacgcaaattgtattaattgtgcagctccattcccgagcagaattttttttatattattaaataacgacacaagttatttaccagatccaactttattgaactctgctacataccatgatacagcttcctttaaaccatctcttacgctatatcttggttggtaatgtaatatttctttagctttagtaatgtcagctaaggagtgacgaacatctcccgttctaaaatctctataatgcggctgagttttctcaagtttagccagtgttcttaaattatcagaaatttcttgatagagttgatttaaactaatcctttcaccgaaagcgatattataaacagctgactcctgtacatttggagctgtggcagccaaaatatttgcttgcacagcattttgaatatagcaaaaatccctactcgtctcaccatcaccattaataaagacttgttctttttgcaaaagtagagatgtccatgtaggaattactgctgcataagcaccctttggattttgtctttttccaaatacattaaaatatctcaaccctatactgtgaaaattatatgtttttgagaatacgttagcatataactcattaacatatttcgtaattgcatagggagataaaggctgcccaatgttttcttcaacttttggtaaagcagggtggtcaccataagttgaactactagcagcatatgtaaaactttttacttgagcatctctagcagcaactaacatgtttaaaaacccagtaatgtttgcactatttgtcattataggatcagcaatagaacgcggtactgagcctaaagctgcttgatgcagtacataatccacacctgtacaaactttttggcaatcttctaaatttcggatatcacctttaaaaaaagtaaagttttcccactgctcttccgagactaaactctgcacgtcatttaagttatgttgaaatccagttgcaaaattgtctaatcctatgactttttgattcaactttaataaagtttctaataaattagaaccgataaaacctgcaacaccagttattaaccatattttaggattactcttaagctgttccaatacttgctcatattgattcatattacttctcaacaaatattattttatagacggatatctgactcagattgatctaagacatatttcaaatcataaagaacatgagatgctttacctaaagagcgaattgcctctatacccatttctttaaactcattatgagcaactgctaatattacagcatcatattgacccgctttaggttgcttaactggagtaataccatattcgtgttgagtttcttcactatcaatccaaggatcatatacatcaacatccatatgatattcttctaattcttttacgatatcaatcactttagtattgcggatgtcagggcaattttctttaaagcttaggcctaatactagaactttagaaccctcaacttggattttcttttttatcattccttttacaagttgagtaacaacataagctcccattgaatcattcaatcggcgccctgctaaaataatttctggatgatatccaattgcttgcgctttatgagttaaatagtatggatcaactccgatacaatgcccaccgacaagacctggacggaatggtaagaagttccattttgtaccagcagctttaagcacctgttccgtatcaataccaagtttgttaaaaataagtgctaattcattaattaaggcaatattgacatcacgctgggtgttttcaatgacctttgccgcttcagcaacttttatactaggcgctttatgagtacctgctttaataattaaattataaacctcatcaatataatcagccacctcaggtgtggaacctgatgtaattttcaaaatattagtaacacggtgaagcttatcaccagggtttatgcgctctggactataacctgcaaaaaagtcttggttgaattttaaaccagatactttttctaaaacaggaatacatacctcttctgttgcacctgggtacacagtagattcataaacaacaatatctcctttttttaatacttgtccaatgctcgtagaagctttaattaatggagttaaatcaggctgtttaaaatcatctattggtgttggaactgttacaatataaaaattacaatcttttaattcttccaaatttgcagtatagctcaagtaagacgcttgttttaattcttctggtgtaacttccaaagtatgatcttgaccacttttcaattcatctatgcgtttttgatagatatcaaaaccaacaaccggtacttttttcccaaactcaactgccaatggcaagcctacataccctaaaccaataattgctattcttaactcggcaagttgcataaaaattagccttattccttacaaattgtatatttaaataatgatacatgttgactggagatcgtcgagcgtaactatagcagtttttttttattctccgtaatgcaattgtataaaagtgtttacagcatttactaataagacggtttaatttttttgaaatgtttttcatatttattgttaaactttttcaacggaaaaatagccgttcggataaactaaacatacaaagcactacgatttttcgatgttttttgatttcttttcagctagaatctgtgcatcctgcgtttaatagacacttgttaatacgcagtagaaaatatcaattaaagataaatacacaaagggtcgcgtgtgaagtattgccagtttttctctgttcttgctttaagcttaagtgctgccagctgtgcggttacttccggtttacaaacttatgatattcctagtgagggtgtttataaaacggacctcggaactacagttaatgtagttaaaatttctcaagaaacattatcggcaattcagcctgctcaaattgactatcaacgcgactacgcatcattatttaaaacgcagcagtctatttatcgtttaagccctggcgatattctttctattcagctttgggcatatccagaaattactcctccagttaatggtattagcagcgaacaatctattcaagccaatggctacccaatcgatcagagtggttatattcagtttccgttggttggacgctacaaagctgctggtaaaacacttgctcaagtcaaccgtgagttacacaaccaactcgctcgctttttaaaaaatcctgatgttattgttcgcgtgctttcatatgaagggcagcgcttctctgttcaaggtagtgttaccaaaggtggccaattttacctaagcgatcaaccggtgagtatttatactgcattaggtatggcaggtggcgtcactacaacaggtgataacacttatattcaactgattcggaatggccgaacttataacctaaatacgattgatttagagaaagcaggctattcactacacaaacttctggttcagccgaacgataccatttatgtcagtactcgtgagaaccaaaaaatttatgtgatgggtgagtcaggtaaaaaccaagctttaccaatgcgtgatcaaggcatgactttgactgatgctctaggcgaaagtttaggaataaatcctttatctggaagttctagccgtatctatgtagtacggactaacccaaatgatcgtacaaccgaaatttatcatttaaatttaatgagtattggtgattttggtttagcgaatcaatttaggttacgcagtaatgatattgtatacattgacgcgactggattaactcgttggcaacgtgtggttaatcagattatcccgttctcaaatgctttatataacatagaccgtttgggacaataattttatgcaaattaaaaatattttggtggtttgtattgggaatatttgccgtagccctatggcagaatatttattaaaacagcaatatcctcaactcaatattgaatctgcgggtatttcggggttgattgggcatcaagccaatgaaaaggcccagctctgtatgcagcgtttaggcattgatatgcagcctcatattgcgagaaagctcaatgccgagctcatcaaaaaagctgatcttattctagtgatgagcagtaaccaacaaaaacatattgaacaaacttggccctttgcaaaaggaaaaactttccgtttaggtcattggcaaaataaaaatgtgccagatccctaccaacatgagcaagctgtatttgatgaaacttgccaactcattcagcaatgcgtggctgactggaaaccttatatttaacgtatagatttttaagcatatgaaccaacagaatactaataccgaagatacaattgacttaaaagaattgtttttttcactgattgctcagtggaaactcattgctctatgcgttattttaagcgttgtatgtgccctactctatttacgtgtaacgccagatacctattcggtagatgctttagttcaggttgaggacagtaaaggggcttctgctgcacttttaggtgatctatcacaaatgattgagcaaaaatcaccagctcaagcagaaatagaaattttaaaatctcgtttggttttaggcacggtcattaaggacttacatctaaatatacaggtctctagcactgaaaatacacttacccatcgcttattaagtgataccgactataaaactgaatacactaaaaaatcggttttatttaaagatgacttaaaaagttttgcagtacgtgaatttgaagttccagcttactatgttgacagaaacttacttcttaattttgataaacagtctttacgtttaaccgatcctgcaactgaagaagtcatcttaactgttccattaaaccaagctaatcacgttgctggtcctcatggtttatggaaagttgctatctttacgaaagatcaatttgatgcgacctataatattaaaagtcaatcaataccagctgctgtaaatgcacttagcgcaaattattcagtagcagaacgcggcaaacttacaggagtgttaggtcttaactatcaaggtcaagataaagaacaaatcactaaagttttaaatgccattttagctacctatagtgcccaaaatattgagcgccgttcggcagaatctgctcaaaccttaaaatttttagatgaacaactacccgacctgaaaaaacagctagatgatgcagagcgtcaatttaataaattccgtcaacagtataatactgttgatgtcactaaagaatctgagctttatttaacccaaagtattactttggaaactaaaaaagcagagcttgagcagaaacaagctgaaatggcagctaaatatacggctgagcatcctgcaatgcgtgaaattaatggccagctcgctgcgattaataagcaaattggtgagctcaatagtactttaaaacaattaccagatgttcaacgccaatatttacagctttatcgtgaagttgaagttaaaacacaactctatacagcccttttaaactcataccaacaacttcgtattgccaaagctggtgaaattggtaatgtacgtattgttgacactgcagttgagccagttgaaccaattaaaccgaaaaagttgttagtccttattttatcggtatttgtgggtggctttattggagctctaatagccttattacgtaatatgttacgtacaggtattaaagactctggtcaaattgaaaatgaaatggatttaccggtttatgcaaccattcctcgttccccaatccaagaaagccgcatcaagattttaaagaagaagaagagtattcctattcttgcggttaaaaatagtgatgatatagccattgagagcttacgtagtatccgtacagctatccactttgcattagcaaatgcaaaaaataatatcattatgattgcaggtccttctcctgaagtaggtaaatcctttatttcaactaacttggcgactatttttgcacagggcaataaacgagtactattaattgatgccgatatgcgccgtggttatatgcataaatatttcgatgttgatgtaaaaccgggtctatcagaacttttaagtggacaagctgatttacaaaatgtattgcacaaaactcaggtaacgaatctagatgtgatcactcgtggtaaaagcccaacaaatccttcagagattttaagctcaaaccagtttaaggaattacttgagcagctacaaagccaatacgaccacatcattattgatactccaccagtgcttgcggtaaccgatggtattattatttcgcaatatactggtgtgaacttaattgttgcacgctacgccaagtcacaaatgaaagagcttgaactaactgttaatcgttttgaacaggcgggtgttaaagtcaacggttttattctcaatgatattcaacgtgctagcgctggctatggttatggctataactatgcttatgcctataaggcacaaaaagaagactaattaaaactcttcataaaaaccggatcaaatgatccggtttttttatttgctttttaagttttgccacattaaaactaactaaaatatataaaaaaccactcgtttttttgttaaacattctatgcttaagtcgaagcatgctaagatcgaagcagccttttagactcaaatgattatttttggaaccctttatgagtaaagccttacccattgctgtcgctgtagttttaggcggtgctgcacttgtacctgtatattatgcaactcaacatccgaccacagaagtcggacgtaaagcagacaaaaatgcttctccaattcaaaaaatcagttacgttcttgggtatgaagttgctcagcaaactcctcctgaactagatacgaaagcatttgttcaagggatccatgatgcgcgtaataagcagcctagtgcttatactcaagaagatttaaaagctgccgttgctgcttatgaaaaagagttacaacaaaaaatgcagcatcaagacaaacctgagcaagcaggtacggctgttgactctgcagatacacagttccttgcagaaaacaaaacgaaagcaggtgtaaaaaccactgcatcaggtttgcaatatatcattactaaagaaggtactggtaaacagccaactgctcagtctgttgtcaaagtacattatgaaggtcgcttaattaatggacaggttttcgatagttcttataagcgtggtcaaccagtagaattcccgcttaaccaggtcattccgggttggactgaaggtcttcaactcatgaaagaaggtggaaaagcaactttcttcataccatcaaatcttgcatatggcccacaagagcttcctggaattccagcaaacagtacactgatttttgatgtagaactcatttcagtgaaataataacaatccaggagagtcgttatactctcctgtttttttggaaaatgacatgaaaaaaatcagtttggttattgcagcgtcaacaatgagtttatctgtttttgctgctgcaccgataacaaataaaagtccggcaaaagatcagtttagttatagttatggttatttaatgggccgtaataatactgatgcgttaacagatttaaatcttgatattttttaccaaggtttacaagaaggtgctcaaaataagacagcacgcctaactgatgaagaaatggcgaaagcaattaatgattataaaaaaacattagaagctaaacagctagtcgaatttcaaaaacaaggtcaacaaaacgctcaggctggtgcagcttttctggcagaaaatgctaaaaaatctggtgtgattacgactaaatcaggtctgcaatatcaggtattaaaagaaggctctggtaaaacacctaaagccacctctcgtgtaaaagtaaactatgaaggacgtttactcgacggaactgtatttgatagctcaattgcacgtaatcaccctgttgatttccagttaaatcaagtgatcgccggatggactgaaggcttacaaactatgaaagaaggcggtaaaacccgtttcttcattccagcaaaacttgcttatggtgaagttggcgctggggatagtatcggtccaaatagtactttaatttttgatattgagttgctacaagttttgccaaaataatttttgaagataaaaaaagcgatctaaattgatcgcttttttattttagtgttttaaatctctcggtctgaagcctgtcagtaataagccaattaagtaagcgatcacacctacaacgcataaacctactacctctgcaacacgaatccattgagagagttcaccgttataccaatttaacccgaaccaaagcgctgcaatcatcgcaagattagccaagccatattgaagtgccagttttttccaatgtgcaccaaatcggaaaatattacgcttatgtaggtagaaatagagcaaacctgcatttactaaagctgaaccagaagaggctaatgcaagcgccatatgctctgcatgccaattgattaatttaaagaatccaatgaatacaacgtttaaaatcgcattggcagcaaccgacattaaacccacacggaccggtgtttttgtatcttgctgcgcatagaaacctggtgcaaatactttaattaacataaaggaaattacgcctgcactcatacattgcaatgcaagtgctgtcatttgtgtatcgcgtaaatcaaactcaccacgttggaacaatgcctgaataatcggtgtagaaagcataaataaagcaatacttgctggcaaaccaaccaacacaatcacttttgctgcccaatcgatcatactgcgaaacttcgcttggtcttgttcagcatgacgtgctgacagtgaaggcaaaatcactgtaccaatcgcaacaccgattaaacctaaaggtaactcggtcatacgttcggcactgtagagccaagacactgaaccatcttgcatgaaagatgcccaaatcgtatttagcaataggttaatctgagtcacagatacaccaaataatgctggaagcattaattttaaaatacgttctacaccttcatgtttaaaatcaacttttggtgggatcagtaagtttttacgccataactcaggaatttgtatcgctaactgtaaaataccagccgcaacaactgaccaacctaaagctttgattggctcagccatatacggtgtaagccaccaagcccctgcaatcattgctacgttcagtaaaacaggtgaaaaagctggcgaggcaaacgagccataactgtttaagatgctactggcaaaagccgtaagcgacataaacattaaatagggaatggtcagacggaacatactgaccgctaaatcaaacttttcagggtcattatggaagcccggcgcatacatatagataattgctggagctaaaaccatagccacgaaagtcagtaaagtcatgactgtcagcaaacagccaaatactcgactaattaagatctgcacttctgcatgcgcacgacctgttttatattcggtcaataccggaataaaagcctgtgaaaaagccccttcggcaaacaaccgtcgaaagaagttgggaatacgaaaagccacaacgaaggtatcaaaatctttacccgcaccaaacacgttgagcaatacgacatctcgtactaagcccaatacccgtgacaacatcgtcatcgcactgacaataaaagtcgatcgccataatgccatcgtactcacctacagctatattcgaaagtcgctattgtaatgaaactagaaaatcttttcgttgtgaaatgatgaatgaactcaagtttttttctgtgctaacaactgcctaaagtgctgccatttaaaataaggtcccggatcggtttttcggcccggtgcaatgtctgaatgccctgcaatatggcttttaatttcaggataggcctgtcggatagcagtaactacatcggttagtacggtgtactgtacttcttcgaaaggcaggtcatcacttccttcaagctcaataccaattgaataatcattgcattcaactttggctaagtagcttgaacgccctgcatgccaagcacgatcattaaagttaacaaactgtaggacttcacctgttcgtaaaattaacaggtgtgtagagacttgcataccttcaatagtctgaaaatagggatgaacggaccaatctaatttattctggaaaaactgttcaatatagcctcccccaaactgagaaggcggcaagctaatattatgaaccacaatcatttgtatttcggtaccagcgggacgctggttaaaatttggagaaggtacttgtctcgccccttttaattgtccatctataacttcatacggtgtgatttgcttcattgagatgccaataaattgcttgccaattgttttagtttaaaacagttaattgcttttcagagtagtcagcatgattgtttatcgcgattaatctgataaaacagcttatttttaaagtcgacggtgctaatatatcgcaagttttagggtcatcgacaaaatggaaaccgtatgagcatacctcagtctttgcttgaacagtcaattcaaatcaatattcaacaagcattacaagaagatattggggacggtgacattaccgccatgctcacacctgaagatgaacaggctaccgcaactattattagccgtgaagatatggttttagctggacagccttgggtgaatgcgctcatctcagcttatgacaatactgtacaggtgacttggttaaaacaagaaggtgaccgtgttgctgcaaatgaagcctttttaaagcttgctggttctgcacgtagtttactgactgtagagcgtcctgctttaaactttattcaaacattatcagctgtggctacaaaaactgctgaatatgttcagcatcttgaaggtttaaacacaaaacttctcgatacacgtaaaactttaccgggcttacgtattgcacaaaaatacgccgtaaccgtcggcggcggacaaaatcaccgcctcggtttatttgatgcattcttaattaaagaaaatcatattatggcagcgggcggtattgcaaaagcgattgcaaaagcacatcaaattgcgccaggtaaacctgttgaagtcgaagttgaaacttgggatgagctaaaccaagcgcttgaagcaggtgcggacattgtcatgctcgacaactttagccaacaacaaatgattgatgctgtaaaacacgtggcgggtcgctgtaaactcgaagcttcgggcaatatcactattgaaaacttacgcgaagtagcgactactggtgtcgactatatttctatgggcgtgttgactaaagatgtcaaagccgttgatttatcaatgcgttttaatgcctaaataaaatcagcatcattattggtatttttttgcgacttggtcatgtctgccgcttgtgttttttgccatgctgactgagtcgcttgtgccccactatcccgtggatcggcagccattaaaacaaaagtaactactgctaataatacaataaaaccttgtagcataaattttccccatcactttaaaaaattagggtttcaaggtaaaagataaatatgactaggcttaggagattctgttacaaaaggtaagcctttatttttattattcatctatacgacaagttattacttgtcttcatttatatttcccaacattagattgtgcgagatgtcatctacaacctgagcaagacaaagcgattatagctttgtcgaagcgcaagaatgttattaagccaactgttgtctttcgatacgtaataaagattaattaatctttattacgtactttactttgggcgaaaccaaagtaacgaattagctacttccactggatgaataaacgataagactccgtcatgctaactaatttaaaataattattaactaagacttcagcttaatattcatgcattacagcaacttaagactctaaatatcccatatatggatcagaaattgaatcttcttgagtttctatacgtcctgcaaaacggcgactaaacgtcgcatcatccgctaatgtcaccgtaaaatcataccaaccaccaaattcagacatatcccaaatcagttctttttcagaactattagtttctatcatccatgtcttgtttggtagataagcattagctttgacgttgagcttgactgacttattaccatcatgacgcacttttaaatataaattcgcatcacattcttctacacatactctaatttccggtaatgcttgagtctgattagcttgacttaaattacctttaaacgcacggtgaaaaccatttggtccaagtacccataaatcatactgtccattgatagtattccacacgtcatcaagctgtttgcccgcctcaaccatataacggcgtggaattgccgtaagatctaatcggttatagacatggaaaacggctgcctgtttacccgtattggagaacatcagcttaaccgttttttgagtggcatcgactttggcactagtgtgcaaaatataaggtaaagcacgcgaaggtcgaattcctatttcctgctgaggaaattgttgctggctcggaacagaaacttgcggcaatagttcttgagcgacacgaatcgcatcggcttcggcttttgttttcttcccatctagttcagcaacaggcaaaagattcggtgttttaaaattaaatgccgttgttaaatcaccacatacagcacggcggtatgggctaatgttaggttcttgcacaccaaaacgtttttctaagaattgtaaaatagaagtatgatcaaagacttgagaatttacccatcctccacggctccacggcgaaatcacatacattggaacgcgtacacctgggccatacacccgtccgtctgtttcgggttgagattttgaagtcgctactgctggatggttaaagtattcataagatacttgttggtccgttaaagtggtttttccatatacaacaccgtttatatctttagaaggtgcgcttggtgaaggaacatggtcaaagaaaccgtcattttcatcgaagttcaccaataaaacggtttggctccacacttgagagttttcagttaatgcatttaatacttcctgaatataccaagcgccttgtacaggactagatggccctggatgttcactgtaagttgcaggagcaactaaccaactcacttgcggtaatttaccttgcgcaatatcagctttaaaagttcctagaaaaccaccgtctggcatggtattggcaatacctttgtaaagtggttgagtcacatcaatcttttcatcatatgctggacacattagtgtgtcgttactgacaggttgcccagattgctcatttgcacggcgatattgcttgaaaccagctaaagggttatcagtaaagttatccggcatgttttgataaactttccatgtcacgccagcctgctgtaaacgctcaggatatgtcgtccattcataaccttctgttgatggaccaattccatcaaattcgttgaccacactcgcaacacctgcgcctgtaggtccattggttcccgtccagataaatttacggttcgggttagttcccgcgtgcatggcacagtggtaggcatcacaaatcgtaaaagcattcgctaaggcaaattgatattcaacttcttgttttttgtagtagcccatcgactgcggttgtttatgcgctacccaatcactcatacgcccattatcccaagcaccttgaccatctgaccatgaatgatttgtaccagtaacacgctgagcatttcctaaacgactatctaagtggtatggcaatactttctttttgttggcgtcatattgttcccaaacctttcggcgttctgtcataggaatggtaaaacggtcaccgaagccacgtacaccttttagtgttccaaaataattatcaaatgaacggttttcctgagtcaaaatcacaatgtgtttaacatcttgaattgttccactttcaactttggcgtcaattgctaacgctttttgaatactcagcgggaaactcgctagagcagctgtcccaaacattgtttttgtagaatttaaaagaaattcgcgacgattcattagttctatcctgagttcttattatggtgcacagtgcattttgcaattactggtaggcggtgttgttggcgatgaattatctgagtcgttatcatcgttacaagcactgagcatgagtgctaaagatgtaattaataaaattgaaagttttcgcattggtttttcccaaacggtttaaatgcgaactactaataaagcgaaaaggtgacaggcaagtgatgtttttatgtcgatttgatgaaggcataaaaaacgcatccgaagatgcgttttttagaaaactaaaacttaccagcctaaagcttcttgttgctttttaatgagctcggcaattcctttttcagccatttctaacatggcattgctctgagcacgggtaaacggtttatcttcagctgtcccttgaatttcaataaactcacctgcttgtgtcatcacgacatttaagtcagtttgacagttcgagtcttcttcatagcacagatcaagcaatacttcatcttgatacatacctacggaaattgcagcaactaagcctttaagtggatcttgcttaatttttttctgtgcaagtaaaacattcatcgcatcaaccaatgctacagcagcaccagtgattgaagcagtacgtgtaccaccatcagcctgaattacatcgcagtcgatcgtaatcgtgttttcaccaagctttttcaaatcaaccatcgcacgtaagctacggccaatcagacgttggatttcttgagtacgaccagtttgtttgccacgagcagcttcacgatcacaacgtgagtgtgttgagcgcggtaacatgccatattctgctgttacccagccttgaccttggccttttaaaaagcgtggcactgagttatcaatgcttgcagtacaaaggactttggtgtgaccaaattcgaccagcacagaaccttcagcataacgggtgtagtttcgtgtaattttcacttcacgtaattggtctaatgcacgttggtcaatacgcataatccttcctaaattctcttaaatacaaacttgggcatagtatagcaaaggattttgacaggttgagtttattccctactttcaaatgtaagtctgcacttttcatgacttaaaaataaaaatagcccctttttaggagctatttattggtctatctattaggcaaatttgaattttgcttttaatttttctaatgtctgcatcacttttgcagtggtgtggtttggtaatgagcattttgctaaacgcacccatacactccagaactgacgcatgaaattagcttcattgtagttaatgccgtattctgcacagagtgccttaattttcggtgctacttctttatagcggttggcaggcatatctggaaataaatggtgttcgatttgatggcttaaattaccactcataaaatgaagccattctgtaccactaaaattacttgaaccacgaatctgacgtaaataccactctgccttagtttcagtatcggtattatccggctcaaacgtttctgcatcttcagtaaagtgaccattaaaaatcacagcagatgaccacaagttacgaataatattagcaactacattgcctgcaaaaaccggtaaaaacataggaccagagatcacagggaaaaacacataatcctttaaaacttggcgtgttgcttttttacggaccttagccgcatcttcccacacctgtttccagcttttggttttataaactaatgcatcttcaagatgtagattttgtacacctacataccattcaaagaaaaacattaactgtagagccagaggaatattaaataggtgacgaggttcccacttctgttgatcacttactcgcaaaataccatatccgacatcatggtctttaccgacaatattggtataggtgtgatgtacatagttgtgtgtttcacgccagtcatcaccagaggcaatggtatcccaatcataggtattaccattcagacttggttcatttaaccagtcaaactgaccgtgcataacgttatgaccaagttccatgttttctacaattttagaaatacccagtaaacctgtacccaataaccagacaggaggaatccagccaccaaacatcaacatgccacgtgatgcgatttcggtatagcgaacgaagttacgcactttgtagatatattttgcatcttgctcaccaagactttgcataacatcttgacgaatctgttcaacacggcggccaaattcttcaatttgctcaggagttaaatgagcagatttagaaacagtagaaaattctaatgccatattcatagggttaatcctctgtaattctttttatagatcaattgtgactgggcttaatgcctggctcacgcatagtttaattggacggttcggttggtcttcaatttcacctgttaacaggttttgagtaactccgctcactttggtacaactgcatttattacaaacacccatacggcagccatgttgcgggcgtagtcccgcctgctctgcactgctcagtaaatttgtttcagctaaaaattcgtgttgagcacggcggaaaataacaggctgtgctgcatgtgtaccagtcacttgaagtggttggaaatattcttgatgaagctgcgactgggcacctttttgtgcataaatttcattggctttctgcatcatgccatgatgaccacaaacataagttgctgtttgctcgaaatctggaaccagcttttgcagtaagctttcagttaaatgctgcttttgctcggtggtattaaaaaagtgatattgaagctgcgggtgctgttctgccaaagcttttaattcagtatgaaaaatttccgcacgattaaaataaatgacatgaatttgttcaagttgctgttttaaagcttgctgcaagagtgaataaattgcagttataccgcttcctgacgcaatcaaaatcgcaggatgctgaccttggtgcaaaataaaatcaccttgtggttgtgaaatctcaacacactcacccacatgtaatagttgagctgcacgagacaccaagccttgtactttaatacctaaagcgatttcaccttgagtggttacttcaataatcgaatagctacgttgttggtaaacgccatcgataagcaacgtcaatagaatgctttgtcccgcacaaacctgttcgaaattaaaattacgatttggtttaagcttgatcagtaccatatcggtatgaagcggctgaacagcggtaacttctgcaagtacccttttccaagcccaagtcgcgttaattttctgcaaaacaaaatcaacgaaatcttctcgaacccaatgtggttgatagttaagtgttgcgttcatacgttcctcttttgtttctggctatttatttgagtgaacacatgttcatatagtgaacatatgtacactatatttataagtgttcactcagtcaacacttgttcactattttttttatgaaagtttgctcttttttgttagactttggctcacggtttaaataggtttttttaatgtcgatacgggatgaacgaaaacagcaaagtcgtcaggcacttctcgatgcagccttgcatctgagcacgtctgggcgttcgttcagtagtatcagtttgcgtgaagttgcacgtgaagtgggtttagtgccaacagcgttctatcgtcattttcaagacatggatgaactcgggaaagagttggttgaccaagttgccctacatttaaaaagcgttttacatcaactcggccagagttatttacagcacaagtctgcaaaaacccaaaccagtattgagctatttgtgcaggcagtgaatcatagccctaaacagtggcaatttatgattgctgaacgttggggtggttcagaaacggtccgtgcagccattgctagagaaattgaatttttgattgaagatctcacaacagatctgactaaactcgaaaattttaaacatattcaaaatcctcaagacttaaatgtcttatctaccattttgaccaatatgtcatttacatgggcaatgacgtggctcaacctcgccaaacaatatcaaggtgagcaacttaaacagcaacaaactgcatttattgaaaatgcgtctacacaagttcgcttactgtttagaggcattgctaattgggaacggtaaaactggcaaatgacaaaaaacaggttatgtgttaatacgtaaagagtgaaagaaaaaggcgaaaatttcgagaaaagtctttttctttttacaggaagtaaactattcgttaggccaaactggtgtgggaatacctatgaatcttgatcgtcatacacagtttttgatgcgcaaagaaaaaattctaagcgttgcagaaaaattgttactagaaaacaatcaggaaattactctagatgaattagtggccgagctagatattgcaaaaggtacgctttataagcactttagaagtaaaaatgaacttctgcttgaattgattattcaaaatgaaaaacaaattttagaaatttctcaaaaatataatactgattttaaagagtatgcaccacggtacatgctccaccatttgctcacaccgggaaaaacgattttattgcatcaacttgaagaaaatctgacgatgacagagtctaagttgaagcatctttttgaagagctttatgaagttcgtcaacaacgtattctagcgattaaagacattacagaaagttatttaaaatcattaaattatgatatgtcgattcgtgactatttatcttatatctggtcactcacttacggtgcatcgttgcttttaaactcaacttattatcagcgctcgattggttctcgccaaaaattaattaatttatatattaaccaagccttatcactacctacccaaaccaccaattttgatgcgctaaattttcagatagaagacgagaattctcaaaattaattgaattatttcgtgattatgaaataaattttataaaaaagggcttcataagaagccctttttaaagcaataaacttttattttgccttacgttctttttcaattaagtaattaaggacttgggtaactttaccatcttcaccctgtacaacatatttaccattaacgacaactgctggaacacctgttaattggtactgttgagcaagtttatttgactcggcaacttttgcagttacagcaaatgagttgtaagtgctattaaatttttgttcaggcacaccgtaacgagtaaagaatttagccgcagaagcctggtcaaaaatctgctgaccattcacttgaattgcatggaataatggtaaatgcgtgcgcttacgtacacctaatgcctcagatgtatagtaagtacgtgccccttgttcccatactttgttcatggctgctggcgtacgcacaaaacgtacatcactcggaatttgttttaaccacgtttgcatatgtggttcaagtttaaaacagtgcggacagccataccaaaagaactcacgaacttcgattttccccggtacttccactttgcctggattggcgattacggtgtagtctttaccagcaacaaaatctgctgccattgcactacccgatacggccataattgctgcactcaaaccacccaaaaccaattttttcattgttacagcttttcctctaagttgttatgcattagcttatgccctaaatataaaacaaatatgctaaattcgttttgcttctgtgaagttttttattgggtttatcgcttttttcccaataatcgctacactaacggcgaactacatcaaaaagataacccaagtttagaggtgacaccatgtcgcaattgaatgttgatttacaagaaatcgcaaaatttgaagcacttgctgccaaatggtgggatcaacattctgaatttcgcccacttcatcaaatcaatcctttacgtttgaactggattgatgaacgtgcaggtggccttgccggtaaaaaagtacttgatgtcggctgtggcggcggtattttggctgaaagcatggcacgtcgtggagcagatgtactgggcattgatatgggtgaagcacctttagccgtaggtcgtttgcatgctcaacaagaaaatgttcaaaatattgaatatcgtcaaattccagttgaagagttggcgcaagaacaagcaggccaatatgatgtggtcacttgtatggaaatgatggaacatgttccagacccggcatccattgtgaaagcatgtcagactttggttaaaccaggtggccatgtgttcttctcgaccatcaaccgtaacccgaaatcttatttattcgccattattggtgctgaatatgtgctgcgcatgctgccaaaaggtacgcatgattatcacaagtttattcgcccatctgaaatggcacatgacattcgtaatgcaggcttaactttaaaagaaatgacaggcttgcactacaacccaattacgaagcgttattggttagcaccaaatgttgatgttaactatatggttcacacaataaagacaggtgcatgatgaaagctgttttatttgatttagacggcactctcatcgatacggctgccgactttattcgtattattcaacaaatgtgccgtgatgcaagacgccctgttgtagaagccgatcttattcgtacacaagtgtctgaaggtgcccgtgccatggtcaaattggtctacccagagctggatgtgaccaatccaattttcttggcacatcgacaaaattttttagatttgtatggcaataatatagttgtcgatactgacctgtttgaaggaatgtatccacttttagaagagttagaagctcagcgaattccgtggggtattgtcaccaataaaccacgtggtttaagtgaatctcttctagaaaagttaaacctgacagaacgctgtgcggttttggtatgtccggaagatgtttctaaaaccaagccagacccggaacctatgtatttggctgcaaagcagttaaatatcccggcaaatgaaatcatttatgtgggggatcacccacgtgatatcgatgctggccgcaatgctgatatgtataccatcttggcagcttatggctatttacctgtcgaacatcgggatgatttaaacgcttggcaagccgattcgattgtaaatacggtgacagaattacacgagttgttacgtcaaaagcttcctgctctacaggaaaatcagcgtatgataagttaatacaagagttttataagtttttttaacggttacttatatcaatataaaaagaaggaggtttaccaatgaaatattcagaatatcaacctcgtccggatctactcaaagatcgaattattttaatcactggtgctggtgatggaattgggcgagctgcggccctcagttatgctttacatggtgcaactgtagtcttgcatggtagaaccttaaataaacttgaagtaatttatgatgaaattgaaggtttaggcgcacctcaacctgctattttacccctccagctttcgagtgcttccgatcgcgattatgactttttagtaagtacactagaaaaacaatttggtcgtctggatggcattttgcataatgcgggcattttgggtgagcgagtagaacttgcacattatccagcagaagtatgggatgatgtgatggcagtcaatttacgtgcaccttttgctttaacccaagctttattaccgctattacaaaagtcagaaaacgcttctgtcgtatttaccagctcaggtgtaggccgtgaggcacgcgcgctctggggtgcgtattctgtctcgaaagtcgcgattgaagcggtgagcaagatttttgcggctgagcatacttatccaaatattcgctttaactgtattaacccaggggctacacgtactgccatgcgtgctaaagcttatcctgaagaagatccgaaaacattaccaacacctgagtccatcatgccggcttatctttatttaatgggtgaagatagcttaacgctcaatggacaaagtattgatgcacaggattaaataattacagatgaaaagctaaaataatttatagccgatcatcacatctggcttggctatacctgaaaagatatatacaagccttttttattattgagaaaaacgctggatttatccgtaattttaattgaagcattaaatgatcttcacagtttctctgcattttgcgcgtacagtattcaacatgagagacatcagatgtaaacgaggatgcatcatgaaaaagttgttcaccatcttagccctttgcatcactgtactgaccaccagtatggcaagctttgctgatcctccttttgaccgaggacatggcccgaaaggtcctaaaggcggacctcgtggtgaatggaatgatcgtgggcataaatttgaccgtgacgataatggtgatcgtgttcgcgatgaacgccgtatgcgtgaggaacgtggctttgagcgtctgaaacaacatcgttggcagccaggttatgtgatgccacagcactatcgtggtaatggttataaagtcgactataaagacaataacttacctaaacccgatcgtaaccagcagtggtacaaaattaacaatgactatattttagtcgacacggactctaacagtattgtgagtattcgcggtttctaagatagatagctcctcactatcgcttagtaggaaaggatgaagctgatcggctttatcctttttttatttttatatcaatataatataaaaatttaaatcttctaaatttcttcttatttcatagaaaattttcacatttattattcttcgccttcacgatttatctgtaatttttcactaatcttcaattatcgaaatttaatagatcattcgaggtttacgatgaaaaagataacaacagcaattgttctttcaatgagtggtttaatcgcaacaacagcaatggctgcgcctcacgaccattatcaccaccaaggttatgagacaaaaaccgttaaagtcattcataaagatgaccatgcgaatatctggcgtgcaggccaagtcgtaccgcatcaataccaacatccacgttatgtcattgactaccgctcacaccagaaattgactaagccaggtcgttatcaaaaatggtataaggtgaacggaaattatgtactcgtaaatgagcaaagccataaaattattaaagtaattcgttaagttcataaaacatctaacacccaaagctaatttgggtgtttttttatctaaaacatgcggctttaatcttttttgtttagaatcctctttatatctttttgctgttgattcgagatcggtatgccaactaagtctttagagaaatcacataataatacccagcattatgtacattggttccgacattcagcaccctacatcaatgcgcatcgtgataaaacttttgttttaatgtttggcggtgaagcagtccgcgatcctaatttcgaacatattattcacgatattgccttattacattctcttggcattcgcttaatcttagtgcatggcgcacgtccacaaattaatcacaaccttaaagaaaaagggattgaaacccctttttatgataactgccgtattactacacgcgaatctttaagctgtgttatgagtgctgtaggatctattcggttagaaatcgaagcattgttatctatgggtttagctaactctccaatgtatggcgctcgaatagatgtcgtatcaggtaattttgtaaccgctaaaccttatggtattcgtgaaggaatggattttcagcttacaggcgaagttcgttcaatagatacagacgcgattgaacgtcatcttgataacaataatattgttttacttggcccaacgggctattcaaccacaggtgaagtatttaatttaagagctgaagaagttgcaaccaaaactgcgacttatttaaaggcagataaattaatctttttaggtgaacaacaaggtttacctaacgaagatgggcaattactgcgtgaattaagcccacaccagcttgattactatattcaacaataccaaaccacacacccaaccctaaccctacatttgcaagaagcaaaaaaagcatctttatcgggtgtacatcgtgtccatctaatttcttattcttatgacggtgcacttattgaagaactctttacgcgtgatggtgtgggtaccatgattaccgatgcgcattatgaagaagttcgtatggcgcatattcaagatgtcggcggcttaatgaacctattacgcccgttagaagaagaaggcattttggtgtatcgctcacgtgaacgtttagaacaagaaattaaccagttcgctgtcattgaacgagacggtatgattttggcctgcgctgccctttatccgattccgactgagtttaatgaaacacgttcagcagaaattgcttgtgtggcagtacacccaagttatcgtaaatcaaaccgtggcagccaaattctgcaatttctcgaagaaaaggccaaacaacaaggtattcgtcaattgttcgttttaaccacccgtaccgcgcactggttcttagaacacggtttccatcaggtgagtgtggatgacttaccaaatgcccgtcaggcactttataactatcaaagaaattctttagtctttaaaaaattgcttccctagactatgcattttttaagatattcttatttcagataagcttagtctaaaaagtacaaccataaaggtaattaatgtatggttgtacttttttaaatctttaaatttttgctattttaataatttttattttatttacacatacttaaatatctttttataaatattattctgttcaataaatcatttttttgcataagtttatcgccgaaagtttttagcttttttttgtataaataaagactgaatatttattttttacgaaataaaaatccctttagggtatctgctcatccaattatttttctttttctctttcggggagcacgaaaccacatggcactttttaattccacttcatgggcaaaatattcagtcattgctgccagccttgcgggagtgatgatgctaggtggttgtgccaaaaaagaggagcacaccacaacaactttaaatatcggctatcagaaatatggcatccttcctattctaaaagcacgtggtgacttggaaaaagcgctcaaagatcaaggcgtacaagtgaaatgggtcgagtttcctgcaggacctcaattacttgaaggcctaaatgtaggaagtgtttcgttaggcgaagcaggtgaagcaccacctatttttgctcaagcagccaatccaaatttagtctatgttgcaaatcaacctgctgcaccaaaagcagaagcgttattggtacaaaaagattctccaatccagtctattaaagacttaaaaggaaaacgtgtcgcactgaataaaggttcgaatgttcactaccttttattaaaagtcttagaagcaaatcacttgagcttgagtgatattcaacctgtttatttaccaccatcagatgcgcgtgctgcctttgaaaaaggagctgtcgacgcatgggtgatttgggatccgttctttgcagcagctgaacatcaaattcaggcccgcgttctggcaacaggtgaaaacttggtaagcaatcatcagttctacttagctgatcgtaaatttgcagaaaataatccaaaagttctgaacacggttgtacaaacgctaaaccagacaactgaatgggtcagcacacaccaagatgaggctgccaagctactcgaaaaacctacggcacttgagtttgatgtactcaaaacatccatttcacgtatgggttttggagttcagccaatatctgacaaggtagcccaagaacaacaatatgtagctgatgccttctacgcgcaaaagctcattcccaacaagctcaccattcaagaagccattttaaaactgaaataaacccagcttgggcacagcttaaataacgatataaatgctgtgccttgtgttaagggaacaaggatatcaatatgcaacatcagtcattatttaataagagtcagtggactcagttagttaagcgctttagcgcggtcgctgtattaggtttaacaatcgcagcacctgcttgggcaattgacccaacagtgaaagaacttcgtattggttttcaaaaaagttcgattaacttcgcgattgccaaacagcaaaaactatttgaacaagaatttccaaatgccaaaatcacttggaatgagttccccgctggccctcaaattttagaagccttagctgttggctcactcgatgttggcgttactggagacacgcccccggtctacgctcaagccgctggcaagcctttatattacattgcttatgaagcagccaaaccattggcctcagcaattttagttcccaaaaactcacaactaaaacagcttaaggacctaaaaggtaaacgtattgcgctacagaaaggttctagctcacattacctacttgtacaggccgtacgtaaagcaggcttaaaatggagcgacattaccccaatttggctcacacctgccgatgctcgcgctgcattccaaaagggtgctgttgatgcatgggcaatatgggatccgtactacgcttcagcacaactagaagaccaagctcgtgttcttgcatctggtaaaggcctaagcccgaactataccttttacttagccgctccaaattttgttaagcaatatccaaaagctgttccaggactcatcaagcagatcaatcaagctgacaaatgggtccaaagccatcaagcagaaactgcaagtgcgattggccaaagtacaggcctaaaacctgcgaccagtgacttatttattaaacgccgtccacgtccatcatcggcagctccacttaacagcaaagtcattgctgaacaacagcagcttgcagacatctttactcaacaaggcatcatccctaaaccaatcagcattaaacaagctgtttggggtgccaagtaatttcaatagatatataggtaatgcacatgaaaattttctggtttattcctacccacggtgatagtcgctatttaggtacaagtaaaggcgctcgtcaggttgaccatgcctatatgaagcaaattgctgtggcagtagataacttgggttacgaaggggtacttattccaacaggtcgttcatgtgaagatccttggattacggcggctagcctaatcgatgcaactcaacaccttaagtttttagttgcattacgtccaggggtaacaacaccagcgttggcagctcgtatggctgcaacatttgaccgcttgtcgaatggtcgtgttctactcaacttagtgacaggtggcgatgaagcagaactacgcggtgacggtttatatgaagatcactcaacgcgttatcaaacagccaatgaatatgtaaaaatctggcgtgaaattttgacgcgttcacatacgggtgaagcttttacattccacggtgaacgcttacaagtagatgatgcaaagctactttacccacctgttcaaaaaccttatccaccactttggttcggcggttcttcagatgtcgctgttgaactcgcggctgagcaagttgacacctacctgacttggggtgaaccaccagcagccgtgaaagaaaagatcgaacatgtccgtgctaaagcggaggctaagggccgtaaattaacttatggcattcgtttgcatgtcattgttcgtgaaaccaatgaacaagcatgggcagcagctaacgagcttatccaatatctggatgatgcaactattgctgcagcacagaaaaaatttgcacaaatggactcagtgggtcagcaacgtatggcggctctacacggcggtaatcgagacaaacttgaagtatccccaaatctttgggcaggtatcggtctagtccgcggtggtgcaggtacagcacttgtcggcgatcctgaaaccgttgctgcacgtattcaggaatatgcggatttaggtatcgatacctttattttctcaggctatccacaccttgaagagtcaatccgttttgcagagttagtattcccattattaccaatcgagacccgagctaaacttgctcaaccaaacttaaccggtccattcggtgaaatcattgccaacaactatgttccagacgagaagaaacaaaatagttccgtcaaggagcctgcatgagcaaagatataaatattgtttcacgtggaacgaaacaagtcgggcagcgtctgctgccttggatttttccgattgttctattggttgtctggcaaattgcatcgagttcagggcttttagaaaatcgtattctgccggctcctacggctgtcgtttctgctttttggcatctactcattagcggcgagctttggcaacacgttaaagtcagtgcaggacgagccttactcggactatttattggtggtggtttaggtttgctattgggtctgctcaatgggtcttcgcgtttcgcctctaccctgctcgatacaaccttgcaaatgattcgtaacatcccagcattagcacttattccactggttatcttgtggttcggtattgatgaaacagccaaattatttttggtggcggtcggagtcttcttccctatttatatcaacacgtatcacggtatccgttcagtcgatccacaattaattgagatgggaaaaagctatggtctttcacgttggcagctttacaaagaaattattctaccgggtgcgatgccctctattttagttggtttacgttttgctttaggtctggtttgggtgctgctcattgtagctgagactatttcagcacaagcaggtattggctatatgactatgaatgcacgagagtttttgcaaactgatgtggtcctggtcggtattcttctttatgccctattaggcaaattagccgatgttctagcgcaacttttggaacgttatttactacgctggcatgccggttatcaaaaataaaggagcttagaatatgacaaatctgaatttaaatattaatcagaatgacgtagagctcattccagaaaaccatccagagttacaagaacctgtggtaggcgcagagattctgattgaacagctttataagttttatggtgaagttaaagttcttgaagatcttaaccttcatattcaaccgggcgaatttttagctattgttggacgtagtggttgcggtaaaagtactttattgcgcttaattgcccaacttgaaaaagccagttttggagaaataaaatttaaatctgcccgacatttgcgtgaaggtattactaacgatgacatacgggttatgtttcaagacccacggttacttccttggagaaatattcttcagaacgttcaacttgggctaccaaaatcacaacatgctttggcagaagaattattagagaaagtaggtttaaaagaaaaagcgggacaatggccttcacagctctctggtggacaacgacaacgtactgccctagcccgtgcgttatctcatactccccgtattttattgttagatgaacctttgggtgcattagacgcgttaactcgtcttgagatgcaaagcttgattgaacgtttatggaaagagcaaggttttactgccattttagttacacacgatgtaagtgaagcagtgcaactggctgaccgcattatattgttagataaaggtcagattgctcaaagttttcaagttaatttgccgcgtccacggaaaaagagcattacttttgctcagcttgaacaacaagtactcgatgccgttttagccacttaaggttgagatgagtaatgagaaccattcaaccgaaaaatgcccaattaacgagcaataaaactgatgatttattgctcttttttagggcgaagattaaaaaatatttttaagaataacaataaactagtgaatctctctattttttgcacaatagtatatctattgctcaaataactatccgttttttcactaaaaaagtgagacacctgtgcacaaatcaaacgatttaccttacaatgggaacactatctttttaatttatgcagcaaatggaacaaaagaagagtacccaaaagcgcaatcagcttcttgctgccgcccttgatgtgttttcactatatgggttcagtggcgcaagtctggatgaaattgcccaactcgctgacatgcataagtcgaatattttctattactatgaaaataaagagtctttatatgtggaagtgctgaccacagttttacaaaaatggctagctcccttacaaaccttagaagctgagttagaaccagccgaagccttgtctcattatttaattcaaaaaatcgaactttctcgtagccaaccaaaagcttcgcgactatttgctttagaaattattcaaggggcaccgcatattttgcctatactgaaagggcccttgaaaaagctatttaagcgcaaagctaaggtcattcaaacttggcaagagcaaggaaaaatttcaccggatatcgacccggaacttttaattctcaatatttggggtcttacgcaaaactatgccgattttgcaactcaaatggaaatggtaaccgggaaaacgcttcgtaaccgcagtatgttccagcgttcgattgagcatacggtacatatgatgctctacggcgtattacctcgctaaaataaaaaagatcggcaaatttgccgatctttttttagaaatgattttgataaagtgctaaaagcttttgtgcacccaataataagttttcttcccaatccaaatgggccgtatcatctgccccatcagtaatatatttcaccgaaattaaacgtacacctaacttgtggcaaacttttgctaacgcatagccttccatatcgaccacatcacaagcgaccttcggctgacccgtttcaaatgagtcccctgtcccacaaattccttttggtaaatccgcaaaatgcgtttggagatgaatttcagccgccaaatgatcatctaacggcgttaccccaacttcaaatcctaaaggtgaaacgtccatatcacgttgtacaaaagtttttatttctactaaatcgtgccgattaaaagatgaacttcctgctgtacctaagttaattaaagttttacagcttgttttttgaataacttcaaacgctttaaaagcagcattgatcttaccaataccactgtaatggacttcgatacctgcttgctcgaataaacctttagattcgttgggaagtgccataattaaagcggtatcagtgttcattcaaaaagctcaaatcagaattaacaaaattagaaagtaagtataaatcaggtgcaaaagctttttgcaccttttcacctttactgcattctttgttgtaaagccactaaacatggagagaagaatagcttgccactgtatgctccggctaaggttttcttcattaccacgctccacatcactaataataaaatactgaatgctacagcgacatattgtaaaaatacaacttcaatctgatgacctaaattaaataaagccaaaataaacacaccaaatgggaaggttaaaccccaccaacccaagttaaatggaatacctgtctttgcatgacgaagtgttgttaaaatcgcaaggccaagccaccataacccaaagcctaaaagtaccagactacccacaacgcccaaggctttaaatacatgggccaactcaggaaagccaacatttacaaatactctttgtgcctgctcacctagcaacaatagacctaaagcacctgtcccaatcggacctaaagaaagccagctagaaatcgcgacttctttttctggtaactgatgcaaagccatacgcaacattaaaatcgttaaaatggcaaatgcaggtaaaacagagattccccaaagtacgtaacccgctaacaataaatgaaagctatgcacatctgctggtaaatgtgcaaccaacatgcccgcagaacttgctgcgacttcacatgcaaccactggcaaaagccaaattgcagtcatggtatgtagttgatgattctgacggctaaacatacaaaatggtacgatccacgcaattgctagtgctaaaaagacgtcgatgtaccacaaagcttgggcgatatgaactgccacttcgccgtaaagcccgattccgaagcttaaaaagccatttagtatggttgcaagccccatcggtatagcacctaaaaacaagctcatatttggatgattaaatatttgcttcgcttcatgcgggaagagtaaccaccgcaataaatagagaactgaaaaaacactaaatagaacaatattaaattgccataacagcgtagccagcataaataaaaatgatttggcaaatggaagctgaattaaaatcatactgaccacgccagtacccatagttgctgtaaaccaatttggggtaaaatgccgtataacatctttactttgatttaattggtaaaagggtcttttcatcttaagtctctaatcaaagagtggatgaggctatagtaggataaattaataataagaaaaattgatttatttttatttaattcatcaattttttagatataaaaagtattcgtattgaaaaatacctgagtaaaaacacaacaacaagacgaatctgtgagattatggcaatatatagcccttgcaaaaatagccatattttaagttcatgaaactgcttcgtcttaatgcgttatcgcccaatttccagttaccacaaacagcggtaactattggtaattttgatggtgtccatttaggtcaccaagcgatgattgctcaactcaaaaaaattgctgcagcacaaggcttaaaaacattggtcatgatttttgagccccaaccgcttgagttctttaaaggctacgatgccccacctcgtattaattcattacgggaaaaagttgaatatctagctgaacttggggtggattacatcgcggttgccaagtttgaccagcatttccgtagcatgagtgcttctgagtttgcagatctattaaaagacaaattaaatgctcaagctttggttttaggagatgactttcatttcggcaaagaccgtcaaggcaatagcgaatttttaaagaattacggctttcaagtcacaaatttacatacgattgaactcgaaggtgaacgcgtcagttcaacccgtattcgccaagtgcttcaagtgggtaatctcgctttagcagctaaattattaggccgtccgtacagtattaccggtcgtgttcaatatggtgaccaaattgggcgaactttagatttcccaacgattaatgttcgtctcaaccgccataagccttgtttaaatggtatttatggcgttgaagtcatttgcgaaacaacttcgctaactcaaaaagtgcttcaggataatcctgaaaagcccggaattgccggatatcatgaaaacagcctctatggtgcaggtcatgtcggtacacgtccagccattcagcaagaacatccagagtggagattagaagtacatttccctgatgtttctgctaatctgtatggcttatttatgcgggtgacttttcttcactatcttcatggtgaattgaactacccttcgcttgaagcacttaaggcaggaattgataatgacgtgcagcaattacgacaatatcgtaacgacacgacacaatttcctttttaattcgaattttgattgtaaaacatgtcggctcccaagctgattaaactggaagacaacttgcatgagcgataagcaaactactgaaaatgcagtggactacaaagccacgctaaacctgccggatactcaatttgcaatgaaagcaaatttggcagtacgtgaagtgaaatggttagaagagtggtataccgacaacatttatcagcagattcgtgcatcgcgtattggcaagaaaaaatatattttgcatgatggccctccatatgcgaacggtacaattcacttgggccatgcggttaacaaagtacttaaggacatcatcgtaaaaagccgtactttggcaggtttcgatgcgccatatgtaccaggttgggactgtcacggtttgccaatcgaactaaaagttgaagaaaaagtaggtaaagtgggtgaaaaagttgatgcagccactttccgtaaacactgccgtgaatatgcgctaaagcaaattgatttacagcgtactgactttaaacgtcttggtattttaggggactgggataatccttatctcaccatgaactacaaacaagaagccgatatcgttcgtgctttaggtttaatccaaaaaaatggccatatccagccgggcttaaagccagtgaactggtgtatggactgtggctcagcacttgctgaagctgaagttgaatacgaagataaaaaatcagacgcaattgacgttggttttggcgttgtagatttaaaagacttaagcgctcgtgtaaatgtagatattcaagatccaacggatatcgtgatctggaccactacaccttggacgttaccagcgaaccaagcagttgcattgcatgccgaaattgaatatcaattggtacaagtgactactgaacgtggtaagcagaactttattcttgctaaagacttagttgcttctgcaattgagcgttacaagcttgaaaacccagttgttttagctgactttactggttcagctcttgagaaccttaccctacaacatcctttactaaccgatcgtcaagttccggttattttaggtgagcacgttatcgcaacaagcggtacaggtgcggtacacactgctcctggccacggtgcagatgactataaagtaggtcttcaatacaaccttaaagttgaaaacccagtgggtggtaatggtgtttacttaccaaccgcaccaatctttgctggcgagcacatctataaagccaatccaaagattattgaagctttaggtgctgtaggtcgcttatgggctcatcaaccgattaaacacagctacccacactgctggcgtcataagactccgattattttccgtgctacaccacaatggtttatcagcatggatcaaaaaggtttacgtgacggtgcgcttaatgccattgaaaacgatatcgagtttgtaccgaactgggggaaaaaccgtattgaatcaatgatcgaaggccgtccggactggtgtatctcacgtcaacgtacttggggtgtaccaattcctttcttcgttcataaagatacgaacgaattgcaccctcgtacgcctgagctcatcgaagaagttgccaaacttatcgagaaagaaggtattgatgcatggtttaaccgtgatgcgaaagacttcattggtgaagatgctgaacagtacaatgctgttcgcgatacgcttgatgtatggtttgactctggtacaacgcattacgctgtacttgagcaacgcgacgaattagaaagtcctgctgacttatatttagaaggttcagaccaacaccgtggttggttccaatcttctttattaacgtctatggcaattcacaatcgtgcgccatataaagccttgttaactcatggttttacagttgatgaaaatggccgtaaattgtcgaaatctttaggcaactatattccgcttgaagaaatcatcaaacaacttggtgccgatggtttacgtttatatgtagcatctagcgactatcgctatgaaattgcagcatcgaaagaaatctttagccgtgtaagtgatagctaccgtcgtattcgtaatacgctacgcttcttacttgcaaacttaaatggtttcaaaccaagtactgatgctctggcagtagatgatcttattgctcttgatcaatacatcttgcaacgtgctaatgaagtacaacagaccattatcgcggcctatgaagaaatgaacttccacgtcgtgtgtagtgcgttaacaagcttctgtattaatgacttaggtggtttctatctagacatcatcaaagaccgtcaatacaccactaaggctgactcacaagcacgtcgttccgcacaaacagcgctttaccatatcgtacaagcatttgttcgctggatgagccctatcctaagcttcacagctcaagaagcttggccacttatcccagaacaaactgacaagtatgtatttacagctgaatggtatgacctacctgtttcatcaaaagcaaacttgctttctgaagcagattggcaaacattgattagcgtaaaatctgcagtaaataaacagattgaatcagctcgtaacgctaaacttgtcggtagtaatctttcagccaaagttgaactttgggcaaatgaatcattacaaacagttttaaaccaactggctgatgaactccgttttgttcttattacttcgcaagtagtagtacatccatttgctgaacaaggtgaagcaactgaaatggaaggcttacgtgtacaagtatctgcagctgaaggtgaaaaatgtgcacgttgctggcatgtccttccggatgtaaatacacatgccgatcatcctggtttatgtggtcgttgtattgtgaacgtcactggtcgtggcgaagtgagaaaatatgcctaattcacaagctaaaaaaggcttattccagttttatcctcacaacctcatttggcttggactttctgtccttgccattgtgttggatcaatggacaaaatggattgcaagtacacatctgaactacgcagatcctgtacctgtgcttccatttttaaactggacactattacataactatggtgcagcttttagctttttatctgatgctggaggatggcaacgctatttcttcacatctttggcaggcttagtttcaatactttttgtattttggttgctacgtatgcctaaaaaaatggtggtgctacctgtagctatcgctttaattttaggtggagcacttggtaatctaattgatcgcattactttagggtatgtggtcgattttattcatgtttattaccaaaatcatcactttccagcttttaatattgcggacagtgccattactctaggtaccattttgctactcatcgatacattcttccttgagaagcaaagacctaaaaattcggatgcataatatgaccgaaattattcaacctaatgaagaaattcgtattactgacggttctaaagttgacctacacttttctgttgctatcgaaaatggtgtagaaattgacaatacacgtagccgtgaagagcctgttagcttgactattggcgacggtaacttgttaccaggttttgagaaagcgcttcttggcttacgtgcaggcgatcgacgtacagtacatctaccaccagaagatgcttttggtccgtggaatcctgaaaatatacaaacttttgatacagttaaattcgaacaacgacctattcctggtcatatgatcgagtttgaagataaagcaaaagcaactttatttggtgttgtgaagtcagtaaatgatgatattactgaaattgatttcaaccatcctctagccggcaaaaatattacttttgaagtagagatatttaaagtgactccagctggtcagcaaggcattaagatcatgtaaaaaaaagccctcgattgagggcttttttattatttaacttttattgatgacataagaatccttacaaattctatattctcacgcacctatataatgaattaagttataaagataaaaatccttaggaaaaacatatgctggtctatattatcgtcggaagtgttcgcgaagggcgcacagctattaaaattgccaattggttagaaacaacaataccctcatttaatctaaaagattttcaaacagaagtaattgatttaaaagaatggaatctacccttattttcaggttctcacccacctgctacaggtatttatgatcaacctaaacaacaagaatgggctgataaaattgcccaagctgatgcatttatctttattagcccagaatacaaccacggttacagcccagctttaaaaaatgcactggactatgttggtaaggaatggagcggtaaaccagcagcatttataggttatggctcaacaaatggttctcgttctattagccaaatacgccaagtcacttcaagtttaagtattgttgacccaaatgctgtaatagaaatacgagatatcttcaaacgcaataaagatgaaaaattcgaagccaatgaatttgaagtaaaaggacttcaatcaattgttgagaaactacagaaatatcatttgtcttaaattgaacaaaaagcctcctttttaaataaaaggggctttttaattttataaactttttaaataattcactatgtcagtattacccgccatttctgcaagctgtagtgctgtatattcgcttttataagggacatgcgcccctttttcaactaatagcttcactatatctaaatgatcattctcagccgccgcttgcaaagcactatacccttcatcatcagtctgattagggtcttctccatctattaataattgttttacttgctctagatcacctaaagatgcccaataaatcagttctggaagagagagttcttcatcgtcttcaggtatgggagagaaagaattaattttcactgggacaccaaaaataaaaaacttcctcattatatccatagaatcgagtaagcatccaaaaatgatttgtagttctatatttaaataattcttttctgattgatttacctgcaataaaaaaacacccccaaccattggttgggggtgtttggaataatgagctggcgatgacttactctcacatgggtaatcccacactaccatcagcgctaagaggtttcacttctgagttcgggaagggatcaggtggttcactcttgctatggtcgccagcacaactgtttatggatacttgcttgggtcttacttgatgccgaagcgttttccaaatctgtaacagactgggctgattgaatctgatttttgttcattttagctaagcgtttaactaaatcaagttgctttgcatgtttatagaatcgattgatgctttatatacaactgcttgggtgttgtatagtcaagcctcacgagcaattagtattggtcagcttcacatatcactatgcttccacatccaacctatcaacgtcctagtctcgaacggctctttagaggacataaagtcctagggaaatcttatcttgaggtaggcttcccgcttagatgctttcagcggttatcccttccgaacatagctacccggcgatgcgactggcgtcacaaccggtacaccagaggttcgtccactctggtcctctcgtactaggagcagatcctctcaaatttccagcgcccacggtagatagggaccgaactgtctcacgacgttctaaacccagctcgcgtacctctttaaatggcgaacagccatacccttgggacctgcttcagccccaggatgagatgagccgacatcgaggtgccaaacaccgccgtcgatatgaactcttgggcggtatcagcctgttatccccagagtaccttttatccgttgagcgatggcccttccatacagaaccaccggatcactaagacctactttcgtacctgctcgacttgtgggtctcgcagttaagcgcgcttttgcctttatactctacgcgtgatttccgaccacgctgagcgcaccttcgtactcctccgttactctttaggaggagaccgccccagtcaaactacccaccagacacggtcctcgtcccggatcacgggacagagttagaacctcaacattaccagggtggtatttcaaggacggctccactggaactagcgttccagcttcaaagcctcccacctatcctacacaagtaaggtcaaagttcagtgtcaagctgcagtaaaggttcacggggtctttccgtctagccgcgggtacactgcatcttcacagcgatttcgatttcactgagcctctgctggagacagcgccgccatcattatgccattcgtgcaggtcggaacttacccgacaaggaatttcgctaccttaggaccgttatagttacggccgccgtttactggggcttcgatcaagagcttcgcttacgctaaccccatcaattaaccttccagcaccgggcaggcatcacaccctatacgtccactttcgtgtttgcagagtgctatgtttttaataaacagttgcagcggcctggtttctgcggctgtcgtcagctcaggaagcgagttccatcaccaacaacagcgtaccttctcccgaagttacggtaccattttgcctagttccttcagcagagttctctcaagcgccttggtctactcgacctgaccacctgtgtcggtttcgggtacgattcctgtgtaactgaagcttagagacttttcctggaagcatggcatcaaccacttcgctgtacaagtacagcttgctatcagatctcagcatagagtaccccggatttgcctaagatacatgcctacatcctttcacctggacaaccaacgccaggctgatttagccttctccgtcctctcatcgcattacacagaagtaatggaatattaaccattttcccatcgactacgcctttcggcctcgccttaggggtcgactcacccagccccgattaacgttggactggaacccttggtctttcggcgaacgggtttttcacccgttttgtcgttactcacgtcagcattcgcacttctgatacctccagcatgcttctcaacacaccttcatcggcttacagaacgctcccctaccacgtatacaaagtatacatccgcagcttcggcacatagttttagccccgttacatcttccgcgcaggccgactcgactagtgagctattacgctttctttaaagggtggctgcttctaagccaacctcctagctgtctatgccttcccacatcgtttcccacttaactatgattttggggccttagctggcggtctggattgttttcctcttgactacggacgttagcacccgcagtctgtctcccggatagtactcataggtattcggagtttgcatcggtttggtaagtcgggatgaccccctagccgaaacagtgctctaccccctatggtattcgtccgaggcgctacctaaatagctttcggggagaaccagctatcaccaggcttgattagcctttcacccctatccacaagtcatcccctggcttttcaacgacagtgggttcggtcctccagttagtgttacccaaccttcaacctgctcatggatagatcgcctggtttcgggtctatacccagcaactaaacgccctattaagactcgatttctctacggctcccctatacggttaacctcgctactgaatataagtcgctgacccattatacaaaaggtacgcagtcacaccacgaaggtgctcccactgcttgtatgcatgcggtttcaggatctatttcactcccctcacaggggttcttttcgcctttccctcacggtactggttcactatcggtcagtcaggagtatttagccttggaggatggtccccccatattcagacaaggtttcacgtgcctcgccctactcgtcatcattatgtgtgccctttcgtgtacgggaatatcaccctctacgttcgcacttcccagagcgttccactaaaacacacataacttaatgggctgatccccgttcgctcgccgctactgagggaatctcaattgatttcttttcctaagggtactgagatgtttcacttcccctcgttcgccttgcaacactatgtattcatgttgcaatacctaccttaaagtaggtgggttcccccattcagacatctccggatcaaaggatatttgccgcctccccggagcttttcgcaggctatcacgtctttcatcgcctctgactgccaaggcatccaccacatgcacttaattacttgactatacaaccccaaacagtcgatgttacctacaagttagtaacttcaacatttcagtttagagcactgtgcacttaagcaccgtacagcttcaatctaaattcacataccaaaacgcttgattcagttaatttgctagttctcaattcatctagattaattgcttaacctaaactcttgagtgaacaatttatttcagactcaattttgccaatctgttaatgagttaatgtgtcttcgtcagatcacactaattaccgtgataatgaaatcacagaagttaataaaccaagatctcaatctttatttactaatttctgtaatccaaacttatcttaagttctggtggagactaggagagtcgaactcctgacctcctgcgtgcaaagcaggcgctctaccaactaagctaagtccccagcttacatcatcaatcatgtatcttttatctataacttcaaccagtcaaagtcatggtgggtctgacaagacttgaacttgtgaccccacgcttatcaagcgtgtgctctaaccaactgagctacagaccctcagatacatctatgaagaacaacttgttgtggattcttaccaatcgtcaatctttcgttaaggaggtgatccagccgcaggttcccctacggctaccttgttacgacttcaccccagtcatcggccacaccgtggtaaccgccctctttgcagttaggctagctacttctggtgcaacaaactcccatggtgtgacgggcggtgtgtacaaggcccgggaacgtattcaccgcggcattctgatccgcgattactagcgattccgacttcatggagtcgagttgcagactccaatccggactacgatcggctttttgagattagcatcacatcgctgtgtagcaaccctttgtaccgaccattgtagcacgtgtgtagccctggccgtaagggccatgatgacttgacgtcgtccccgccttcctccagtttgtcactggcagtatccttaaagttcccatccgaaatgctggcaagtaaggaaaagggttgcgctcgttgcgggacttaacccaacatctcacgacacgagctgacgacagccatgcagcacctgtatctagattcccgaaggcaccaatccatctctggaaagtttctagtatgtcaaggccaggtaaggttcttcgcgttgcatcgaattaaaccacatgctccaccgcttgtgcgggcccccgtcaattcatttgagttttagtcttgcgaccgtactccccaggcggtctacttatcgcgttagctgcgccactaaagcctcaaaggccccaacggctagtagacatcgtttacggcatggactaccagggtatctaatcctgtttgctccccatgctttcgtacctcagcgtcagtattaggccagatggctgccttcgccatcggtattcctccagatctctacgcatttcaccgctacacctggaattctaccatcctctcccatactctagctcaccagtatcgaatgcaattcccaagttaagctcggggatttcacatccgacttaataagccgcctacgcacgctttacgcccagtaaatccgattaacgctcgcaccctctgtattaccgcggctgctggcacagagttagccggtgcttattctgcgagtaacgtccactatctctaggtattaactaaagtagcctcctcctcgcttaaagtgctttacaaccataaggccttcttcacacacgcggcatggctggatcagggttccccccattgtccaatattccccactgctgcctcccgtaggagtctgggccgtgtctcagtcccagtgtggcggatcatcctctcagacccgctacagatcgtcgccttggtaggcctttaccccaccaactagctaatccgacttaggctcatctattagcgcaaggtccgaagatcccctgctttctcccgtaggacgtatgcggtattagcatccctttcgagatgttgtcccccactaataggcagattcctaagcattactcacccgtccgccgctaggtccggtagcaagctaccttcccccgctcgacttgcatgtgttaagcctgccgccagcgttcaatctgagccatgatcaaactcttcagttaaaatcattttgcaccttatttatagacaaggtgccaattctggctcatcaattactgacttaaatttcgctcaaataaacttcgagtaatttaaaccaatcaatcaatgaaaattattttttttgattaatcaatcagtaaaaatccacacaagttgttcttcaattctcttaatgatttttctgctcctcatcagagacagaattcaacgcaatacaaaaccttcaccttaaccctgtaagctaagatattctcgtgtatcgcgtcgggatgagtgcattatagggaaaaaaaaccggtacgcaagcacttttataaatatgcgcgctcgaccggttctttttcagccaaataaaattttaaaaataattaaataactgatttatataaataatttatttttgagaatttttaatttttatatctactatctttataggttgttttggtacgttttgatgcatgccatagtttgatgtaggagcctgaacaatacggtcaactacatccattcctttgaccactttaccaaaaacggcatatcccggatttcctggtgaacggttaagaaagttattgtctgcaacatttataaaaaactggctagttgctgaatcaggatttgaagtacgggccatcgccaaagtacctcgtgtatttgcaataccatttcctgcttcgtttttaataggtgctcgtgttgtcttttcctgcatgttcgcagtcattccgccaccttgagccataaatcctggaatgacacggtgaaagatggtctctttataaaaaccagattttatatagcctttaaagttattcacactcattggtgctttatcatcgtataactctatttcgatgttgcctaaatttgtttgcatctcaactaaggtattcgcccatactgagtgactacttactcctaaacacaacaacatcagtaattttttcatattgccctacaacaactttataaataattaaccgttaaatctaatcgcctacggcaaacaattctagtgagtatttattaatagctttatatagcttttatattaatccacgttccacgtgaaacatggattaatcagcttagttaactatttttatcccaaaactttctaaagtttttactaatttcgatcgtataacgttttgcttttctagaaatcggagtcaggttaataaagccatgggtctgatccggaaattcttcataatgcattttcacgccattttgtcttaacttatgactatatattttagcttcatcatgtaaaacatcatgccccgctgtaatcacaaaagcaggcggatttttctttagattgccataggtaggtgaaattattggatcatcaagttctacattatgatgcgttgcataatattgagtgacatagtcaatatcagtatttgttaagactagcccttcgttataagcataaaatgaaggatgtctgcttttgaagtcgactgtaggataaatcaataattgtgcctgcggagcataagctttatttactgatctttgcgccacgacagtactaatatttccgccagcgctatcccctgcgacagcaattctactttttaatatttttaattgtctgcggttttgataaacccaagctaatgcatcttcacatgattgaattaaatgttgtggtgaaacttcaggtgctaaaggatagtcgatactgagcacctgtacttttgcatattttgctaataagcgacaaacctcatcatgagtatccaaaccacctacaacaaaaccacctccatgatagaacacgattaagggcagttttttattaggggcaggatgataatgcctagcaaagatagtcccgctttgtaggggtaagcgaatatcttctactaactcaatatcagttggtttttggcgtatggcctgcatttgtgcatcgaatgctcttcttgattcaattgggtctgaaccaataaatcccactctcccctgtttaatttgcacagccatcatgcatttcgtaaatgaatcgagatctggatattgataagagtatcctaaaattctagcgagagactcttgagctagtcgaggtaacctatcgagtgctcgagcagcaggaccttgccccttatctagcaatgtttgaattttttgattaaatgctgtcatgcctgtctccttgaatccctcttatccttcatattttctacagaattctttgttgtttgactatattcgcatacaactcatgcaatcaagatacaaaggtaaaaaccaatctacgctaatctgatttatagcaaatgtcattaacaaatctgtcgtttaaaacaggacttttttgccaattattgttaacagacaaaaagaggtactgctatgtcagcaaaactagttgttactttgttagcaaccagtcttttaactgtaggctgtgttgcttatacagatgatccttattatcgcggtggttatggttaccatgatcatgatgacgatcgttatgaccgtaacgatggacgtcgatatagtgagtgggaacgcaaacgttgggaagagcgtaaaagattatatgaacaacaacgcaaagatattcgcgaacaggaaaaggatcgtcgtgaatgggaaaaacgacaccgtgaatgggagaagaaacgcttagaagaccgagatcatgatcatagagattatcgtcatgatgactaaacatactacttctatataaaaagccccaaagcaataagtctcttggggcttttttgaggaatataaattctctctaatttatagaaaaatgagtagcagctcatttcatatatgtatcggcatcttgaacatatacgttctataaactcatatctcttatttttagcagcaaattactgagcagttgcagaacctgaaactgaaccagaagcgccagcatcaacttgacctggttgagcttgaccagaaacacctgcatctacaccaacaccagcttgtacgccagatgggctagcacttgtttgagcagaaccagaagcgtttaaaccagcttctgatgcacaaccaacagctgtaaatgcaacaccagcaagtactacagagataagacctaattttttcatgatagctttcctttcattacgacaaacatttaaatgcaaagttcatcttcgcgctgcctataattcacaattttttttctcaacgtgcgtatcattggttgtcttttgtagtaatagcggtacaaattctgcaattttttattaaaattactttcttaaatcaactatattattttataaatgaaactatagataagcacttgtttaattttatcaattttttattttttctctatttgacagatatattcaaaatatttccctttatagaaacgcaatacaagttgcgtagattgttacagagctttttgacttttaaaatcgatttttctctaagaaagccgtgaattgtcacagctttcttgaaagttaatatggcttaaacattagattatggccactgcatttcaccttttaccactttagcgccgagctctaagctatcaacactttgaagcgttgggtattgcttctgcatgagcttgctcagctcagtagcatttttagttgctttagctgctttttcataactatttaaatagttaatcgaaaagttaacagcatctaaaccttgtggagctccctcaaccatatgagcaggtacaacaattttaggttgtagtgctttgatgctttctaaagattgaataacttccacacgatctctggttttaggtgtatctgccatccataaatgaatacctgaagataccggaataccccccacgactgcttttgcagaaggaacccataaataagtaagctcttttttacctttaatctcgattgactcattctcaagttttaaagttttagcagtgtaagcttgaggcacaataatctggctaggtgcatttgcacccatttgtggcccccaatatttaactttaagcgcttgagtatcctgaatatgctttactgtttccggcgtagcaatgatctgtacattcgggaaatactgtttaaatacatctaagccgaaataataatccgggtcgccatagcttacgaaaatagtttttaatgttttaccgctatcgagaatatttgcagcaatacgtaatgcttcagattttgagaattgtgcattaaccagtaaaacttctttgtcgccttctattaaggttgaggtgacaccaaagtgctctggtttagccagaaaactctgaattttcagatcttgagcaagagctgactgagccatagttaatgccgtagcagtagcaagtgcggaagcggataatttaaataatttcattaggtattctcctgtttcatgaagaacactttaaattgcaatttatgtaagataaacgcactaatttaagataaactgttgcatatattgtaataatagctagacatatggatactttaaaagccattcaggtctttgtttctattgcacaacacggtaatttaactaaagccgcagagcatcttaattattctcgtgcaatggtttcgcgttatcttgagcaccttgaacatacattctcaactcgactatttcagagaaatacccgaaaaatatctcttacacccgcaggtgaaaaagctctgctctactgcgaaaatattttacagcagcaacaacttttgcaagaactcgcagcgcctgaacaacacaacggtacaatccgttttacatgcggattatttctatttgaacttggggttgcggaatgtattcggcaatttaagagacagcatcctcatattcaatttgatgtgtacctgactgaaagcacgatggatcttatagatgcacaagtggacttggcactacgcattactcaaaaagtcgcagatggtttaattgcacggccagtttgtcaaatcgaatccgttttctgtgctcatcctgattatttaaaacagcacagtcccctactccatcctcgtcaactcattcaacatgaatgtattgcacatcatagccaacatcaattctggacactttttgataatgaacaacaacctcagaactatcctctaaatgtcacttttaaaagtaatgatgtgaatgcactttacgatatgtgcttacatgcacagggagttgcaatgttgcctacattattagttgagaaagatttaaaagaaaaacgcttaaaagctttatttaaaaattttacggctccggagttaagcttgtcggtcgtgtatgcttctagacaacatttaccccgaatcactcaagaatttatagcttttatgatcgaaaatttagatttttacttaaaaccgcaaaattaaaagctttaaattgccgtgtacgcttgaatttttaggcaatgcccatacttcatccctattaatgaattacagcatatgcatggcagttcaggttttacacagtaaatactgatgccaaaaaggactgtacatgtttaaaaacccatttaaacggagatcatcaatggctaatgagcaaaacgagcaagctcaagacattcaaaatgagcaagttgagcaatctaacgagcaaactcaggctgaaggtgtagagcaagcaaacgacgttaccgttgaatctttacaagcgcaaatcactaaactagaagaaaatcttaagcttgaaaaagctcgtactgccaatgcagtttacgaagcacaaaaaagtgtagagcgtattcagcgtgaatctgagaagcataaagagactgtgcttgagaaatttgcaaaagaattgttggactctgtcgacaatttagaacgagcaattcaggcagctggcgatgaagaaacgcctgtacttgaaggtgttaagttaaccttaaagtcacttttaacgactcttgagaaatttggcgttgtagaagctgatactcaaaatggtttcaacgcagatttacaccaagctgttggcattgatccaaatgcaaaagcaaatgaaatcggtaccgttttacaaaaaggctataccttaaatggccgcttattgcgccctgctatggttatggttggtcaataaaatgagcaaaagcaaagcatctctttgctaaaagcccaagaatttgagagttttttgattttttttcataaaaatgcttgaaaaaaaccgattgactctcatatcgaataacaagcaaaaacattgcaacagaattttagaggaacacaccaaatggcaaaaattattggtattgacttaggtactaccaactcatgtgttgctgtacttgaaggcgataaagtaaaagtaatcgaaaacgcagaaggcgcacgtacaactccatcgatcattgcgtataaagatggagagatcttagtgggccaaagcgctaagcgtcaggcagtaacaaaccctaaaaatacattattcgcgatcaagcgtttaattggtcgtcgttatgaagatcaagcagtacaaaaagacatcggtcttgtaccttataaaatcatcaaagcagacaacggtgatgcttgggttgaagtaaacgataaaaaactagcacctcaacagatctctgctgaaatcttgaaaaagatgaaaaaaactgcagaagattatttaggtgaaacagtaactgaagcggtaattaccgttcctgcttactttaacgatgctcaacgtcaagcaactaaagatgcgggtaaaatcgctggtttagatgttaaacgtatcattaacgaaccaactgctgctgcacttgcgttcggtatggacaaaaaagaaggcgaccgtaaagttgcagtttacgacttaggtggtggtacattcgacgtatctatcattgaaatcgcggaccttgatggtgaccaacaaattgaagtgttatcaactaacggtgatactttccttggtggtgaagacttcgataacgcgttaattgaatacttggttgaagaattcaagaaagaacaaaacgtaaacttgaaaaacgatccacttgcgttacaacgtttgaaagaagctgctgaaaaagcaaaaatcgagctttcttcttcgaatgcaactgaaatcaaccttccatacatcactgctgatgcgactggtcctaaacacttagtgatcaacgtaactcgtgcaaaacttgaaggtttagttgctgatttagttgctcgtactatcgaaccttgtaagattgctcttaaagatgctggtctttcaacttctgacatctctgacgtcattttagttggtggtcagtctcgtatgccacttgtacaacaaaaagtacaagaattcttcggtagagagccacgtaaagacgtgaaccctgacgaagcagttgcaatcggtgctgcaattcaaggtgctgtattgtctggtgacaagaacgacgtattgcttcttgacgtaacaccattaactttaggtattgaaacaatgggtggtgtattaacaccaatcattgagaaaaacacaacgattcctgcgaagaaatcacaagtgttctctactgctgctgataaccaaccagcggtagatatttcagtttaccaaggtgaacgtaagatggctcaacaaaacaaattgttgggtaacttccagttaggtgacatcccacctgctccacgtggtgtgccacaaattgaagtatctttcgatattaacgctgacggtatcttgaaagtgtctgcaaaagacaagagtactggtaaagagcaatcgatccagattaaggcaaactcaggtttatctgatgctgaaatcgaagcgatgattaaagatgcagaagcaaatgctgaagaagaccgtaagtttgaagaacttgcaaaagctcgtaacgaagctgatgcattaatttcaagctcaaacaaagctgttaaagatcttggtgacaaagtaactgaagatgaaaaaacagcggtaaatacagcagtttctgaacttgaagcagcaacaaaagaaaatgatgttgaagcaatcaaagcgaaaactgaagccttacaaaacatcttaatgccgatcactcaacgtgcttatgaacaagcgcaacaagctggcggtgctgaaggtttcgatccaaatgcattccaaggtggtgatgctggtcaacaaaaagcagacgatggcgttgtagatgctgagttcactgaagtaaaagatgacaaaaaataatttgtctctttaaaaaagaccgcgcgaaagcgcggtttttttattgtttacaaaaaaataacaataatattttttatatattttcatgaacttaataggcaaaatagtcaattataaaaattaactgcttattatttatagatattttaaaaaattaaaatcactgttatgaaatccattaatttttccattaatgccaaacacatgtatttatttattctctttctttagcaagatcacaaaacaatcgctatctctggtcatttttatcactttgacgaataaggattatatcctaacaataagaatttatttatatttttatttttgccatgaaaaaatttctatggtggggaataagtttatacttcagtataagcttacaggtagctacttttgctcaaagcaatttatcaaatatttcttttaatcaacctttaaaatataggatggattatatagatccacgttttgaattaacgaaagaacaatttattcaaattggtaaagaagcagctgaaatttggcaaaaagaaactgggaaaacctattttatttatgattctcaagcagagcttactattaatttagtattggacaaccaacaagctactaaaaatgaaagaaaaaatagtataaatgagctattaaagcagcaggaagaatggagagagaaaaataaagctattcttttatttaaacaacaaattgatcaggaaacttctcttttgaataaagaaaaagaaaatctcaagtataaattcgaacaatatcaaaaagatgtatctctttttaatcaaggaaactatgggcaatttactcaaagcagtttaaacaaacgccaagctgagttaagccagctttcgttagaattacaaacaaagttttctcaacatagcaataaaatagaaatgcttaatagacaaattaagcaaataaatcaacaacaaaacctgcttaatcaatctattgagcaatttaatttgagcacgacttctggctcaaaaacttttcataaaggcttgtttagtcaaaaccaaattcagatttatggctttacttcattcgatgatttgcgcctaacacttgctcatgagtttggacatgcattaggtttaaaacacaccgataatcctaaatctttgatgtaccctcttttaagagagcaggatattcataacttcaaattaacaaattcagatttagatctattggctacattatatggctcaaatgacgaaaatcattaaaactaactgattaaataaactaaataaaataaaaactattcaatttttactaaaaaataatttggcatttggtaaaaaataatgagactcaagtctcattattttatcgaaattgtatattttttgattgatttttcattttatattcttataatacgttttttttcaaatctcccccctttgattatgcgtttaacttctttgttattaggcatggcctttgctttttctaattttcaggctaatgctaatcttgcgactcccctacacacccaagttcagcaaaaaaatgttcaacatttgacatataaaattgctgaagttgatcctcgttttggtttaagtcaagagcaattgatccagattacacagcaagctgctgatatttggaaagaaggtacaggtaaaaattactttacttatgacccaaatgcaaagttagaaattcgtcttgtatacgatgacagccaaaatcgttcagcagagcgtcaaaaaatcgcttctcagttcaaacaagaccaacaacgtgtaattgatgagcaacaacaaattaaacagttgaagcaaaatttaagtcaaactcaatcggatcttgaaaataaaaaacagatcttaaatgaaaaattgaagaattttgatcaacagatgatgcagtttaaggaaggaaaattagctcctgaatacactgcaaaatcactttcgaaaactcagaaagatttacagaaacagacagttgctttaaagaaagatatcgctgcttataatcagcaagctgcagacttaaataaaaaggttactcactttaaccagattaatgatgaattcaatcaatcattaaatcagtttaagcaaaatgcccaagctgatgtatttaagaaaggtatttataacggtaaacaaatcatgatctatgaatatagttctattgatgatttacgtttaacgattgctcatgaattaggccatgcacttggcttaaagcatagtgatcaaccgggtgctttaatgtactcagttcgaaaagatagcgataaaaaaagtaatattttaactgatgctgatcgtgatctattaagcgctttacctcaataattagatactgaactcatacgatgtatctattttataaatagatacatcgaaattcatgtcaaagtcatgttattgtggttgtaagagccgtctaaaatagaatggagatcaagatgagttattatcatatcctgattgaagtaaatgatcacattagtacgattgagcaaactcgagatatcgaactatttgatattattgaacttaaaccttatcttcattctattttattaccttacttcaatgagcaagaaattgagcttgaagatgaaaatattgaatataaagatattttacatctggaagttaagcagacattattgcctatcgagcacctaattgaagaagaacaaaagcagctaccaagtgatacagatgtcacaattactgcttatgaaatctttaatgaccgtgatttaagccaagatgttacctcagttatttttgatatattggaagcagttaagctagatcaatctatagtttagctgttcaataaaaaaggtctgcatatgcagaccttttttatttaatattttattgcatcatttttcgtgcttgttcttggcggaatgcacgtaaaatttgttgccctgcccgtcctgttggatttaaacctaaacgggtttgctcctgacgaatagcaacacgggttttatcgccaatcaatccatcaacagcaccaatatcataaccacgattaatcaaaaattgctgaatttcgcgacgctctgcacgtgaagtaccaggatcatcagttggccaagagctaacaaatggacctgctcctcttaagcgatcagacaaatgtgcaattgccagcccgtaactttccgcagcgttgtaactataaatagcatcaaaattcttaaatactaaaaatactggtccacttggtcctgctggagccattaaaccggctggcgtactaccagacaaaggaccttgtattagtggcgaaccatcaatccgtgttactcctcgcgcactccaactgcttaatggttttttcgagcgtcgtccttctccatcaattgacatgcctgctggaatttgaacttcaaagccccaaggcatacccgtctgccaacctgctttattcaagaaattagccgttgaagccaatgcatctgcagtactcgatactaaatcgcgtcggccatctccatcaaaatcaaccgctaagcgttcataagttgatggcataaattgagtatgaccaaatgctcctgcccatgaacctttaagttgatcttcggttaagtcaccacgctgtaaaatacgcattgtggcaaaaaactcagtacggaaataactttgccggcgcccttcacaacttaaagttccaagcgcttgtaataaaggatattttccagagatatcaccaaaattactttcaacgccccatactgctacaatggtttcagcaggcacaccatacacttgagaagcacgatttaaaacatcacggtgttgtgcaagtttttgttttccaagtgcaacacgttcttcatctaccaaaccagacaaataatcccaaatcggtgtcgaaaactctggttggtaatttaacttatcaatcaccgagtaatctggtgttaaattttgcgtatagcgatcataagtgctacctgaaacaccagcagcaatagcctgtgaacgtaaatttgccaaacagctctggaaattattattaggcgtataaatatcactattcgttactggaacagtcgcattactagatattgtagaaccattaattaccagctctgcttgagcctgggtcatcgccaaaaatacagacccaacaatacaagaaaaacgtcgcatattatcctagttcaatttttaaatttaaatttgtaagtaccataccattatggactcaaatttttcagagagaaatcgtaaatttgaattcataattacttctttaaattcatttccagagttttaaattcaaatttccctctctatttttgaatttaaaactttcctcacaagatgaattaatttttaaattcaaaatctgccctataatttaaattcaaaaacttcattttaaatttaaaaatccaagcccaacccacttgtggataactcataaaaccacacatctaaagcgccttacacactatattctttatgcttttcataacttttgtgaagtacaagcccttggctactcatgaatatacgttttaaatttaaaagtcaggcgcagttttgaattcaaaatatcattcagacgacatacatctttttaaattcaaaacaaacacaagctggagtaccagatttaaattcaatctttaagtattggggataacttattttaaatttaaaaactctcaaaacaacttatttcatttttaaattcaaaattagaacctttatttaaattcaaaagctcaacaaaagttatccacagtgagcaaataacaggtttttaatatttttttaaatttaaaagacaaaaaaagcgatccgaagatcgctttttagaaaatttaacttatttaaatggtcatatcatctgttaaagcgagtggttctggcaaaattttcgctaactgacggcataaattcgtcaattcattactatccacaggcattaacgtaatgtgacctaacttacggccagcacgttccgatttgttataaaggtgcagatgagcgccatttagtgccaaaacatcttcagttttaggatgctgaccaataatattgatcataaccgttggtcgaacaacgtctgttgaccccaatggtagtcctgcaacagctcgaatatggttttcaaactgtgaacatacagcaccttcaattgaccagtgacctgagttatgcacacgtggtgccatctcatttgcacacaagccttgttctgtcacaaataactctagagtcaatacaccgacatagttaagatgattcaacaaacgcgtaatgtagtcttgagcaacaggttgtagagcttcactattcggtgcaggtacgattgagtgagacaaaataccattgtgatgatggttttcagccaatggccaggtcttcacttcaccattttgaccacgtactgcaataatagaaacttcgcgagaaaatttcacaaaactttcagccactaagctttttgcaggtccaagttcagcccaagctgtatcaatttggtcttctgaacgaagtacaaactgacctttaccgtcatatccgccagttgcagtcttaagtacaatcggcaaaccaagctcagcaacagcttttttcaagctttctaggctatctacagcacgatacggcgcaacaggaatcgcaagttcgtcaaacaatgctttttctgacaaacgattttgcgcagttgctaaagcaatacggggagggtgcagtgttttagtttgtgttaacacatctacatctgcaacaggtgtattttcaaactcaagactgaaaacatcagcgctttcaataaactgctttaaaccttgttcatcttgactagaaaaaacttggcctaaaacacctgctggacaatctgtatttgcttcaaaaaaagtacattgaatatttaatggtaaagctgcttgcgccatcatacggcccaattgcccaccaccaaaaataccgatagttttatccatttcagcctcttaaacctgtcccggaatattgttgcttgcaactttatcagtttgtgcagcacggaaatctgcaacattttttgcgatttcaggacgagttaaacctaagatttgagcagccataatcgcagcattggtcgcaccagccggaccaattgccaaagtacctacagcgatacctgctggcatttgtacaattgaaagtaatgaatctacgccatttaaaattgatgatttaactggtacacccaatacaggtaaatcagtttttgccgcacacatacctggtaaatgcgcagcaccaccagcgcctgcaataatcacttgaataccacgatcacgcgcagtttctgcatattcaaacaaacggtccggagtacggtgagcagataccacttccgcttcaaatgggacaccaagttgtttaagcatattggcagtatgttcaagcgttgcccaatcggactgggaacccatgataattccgactaaaggttgggtatctgttgcgaccgcgttcattggcatttccaaagcgtaaaaatggtaaaaactcgacttgtaccaagccaagcatgagagaaaaagatgaggccaatattatagctgttttttcactcaccccaaagcccaagtttatgtggaaaaagcatgattccgatggatttaacaacgatctgtctgaaatcccaatttcatataattttactggcttctaaatacaaaatagacacaaccaaacaagcataacatagcccaaacatagtctagcttgaacggctgcttaaatagcaacaccataaatggaacaaatacaataagcgtgacaacttcttgggtaattttcatttcacccaaagtccaaccttggtcactcaagagtcgagttgccggaatcataaaactatattcgagcagggcaatagcccaaccgaataaaatcgcttgccagaatggtgcgtggtgcaaaaacttaagatgcccataccatgcaagtgtcataaaacagttagaaataattaacagaacgaaagctaaaaccgttgggctcaaaggcacatccttcatcatctcgatgatgtaagtattaatatggatcgaaaatattataaaagataaaactgtaattcagcttaaatctaaaaaataaagctgtacttttatgaacgcctcaaacacatagaacaacaacgaattttgactatcttttccagttgagccttgctatcgttgctggcaaatttatcaataatgaaaacacagtaattcacattaatactgtgtacaaaagcagtggagaaggcgagcaatgcatctgcatatcttgggtatttgtggcacttttatgggctctttagcacttttagctcgtgatttaggacataaggtaacaggttccgattcaaacgtttacccgccaatgtctacccagttagaaaatgcaggtattgaactcatgcaaggctatgaccgtagccatttacagcctcatccggacttggttattgtcggcaatgccatgaaacgtggtatagatgctgtcgaatacatgctaaatgaaggtctgccatatatttctggtccacagttccttgctgatcacgttttacaaggtaaacatgtgcttggtgtggcaggtactcacgggaaaacaactacgacaaccatgctcgcttgggtacttgatcaggcgggtttaaacccgggctttttgattggcggtgttccacttggttttagtgaaagcgctcgtttaggcggtggcaaatactttgtggttgaagccgacgaatatgactcagctttcttcgataaacgttctaagtttgttcattatcatccaaaaacggcgattttaaataaccttgaatttgaccatgccgatatttttgatgacctagcagcgattcaaaagcaattccatcatctggttcgtactattccaagtgaaggccgtattattgcgccaattaccgaaactcatattgatgaagtacttgaaatgggctgctggacaccagtgattcgtacaagtttagaagcaaatgaaaaagcggctttgtctgctgaattaatttcaattgatggcagccattttaaagtactcgaaaatggcaatgttgttggcgaagtgaaatggagcatgacagggcagcatagcgtagcgaatgcattggcaacgattgcagccgctcagcatgtaggcgtttcgcttgaaaaggcatgtgaagctttgtctaactttggcggtgtaaaacgccgtatggagttactcggcacgatcaatggtattgaggtttatgatgacttcgctcaccatccaacagcaatcgacacgactttagatggcgcacgtaaacgtttaggcgaacgtcgtttatgggccattattgagccacgttcaaataccatgcgcatgggtagccataaagatggcttagcacattctgctcgtttagcagacgaagtgatttggtatcagccagaaggcctagattgggatttacaacctgtgattgaagctgcgactaaccatgcccaagtcagccgttcacttgatgaaattattgaacgtattgtcaatgaagcaggtgagggtgatgccgttgtaattatgtctaatggtggttttggtggcttacatcaaaaacttatgagcgcattaaaagcaaaagctgcttaacttgcgctctagatgactcaataaaaaacgggtttcaaattgaaacccgtttttttagcttaattatttttaaacctgttttggctctatattttccataaatttattcgagatgaataaacgtaacgtatagacaatacccatcgcaaacacgctatatcccacgttattacaaataaacggaatacataaaataatgagtgcagtaataggataaaaccatttagtaattccagataagcattgaaactcgtaaagtatccatatgcagctggtataaagcaccacactcaccgcgacaattacacccatgtataaatcagaaatatgggcatggtgggtggtgacatccacagcagcagcaagggcagcacctacggcagcaatactcacaaaaacaaaataatggccatatccccaaacaaacggacgtacacctttaacatgatgatgctgttcactacggtcaaagtaagcccaccacattgcaaacatcaacattaatccgccaatcattaaaaaaacagccggaatattaatagattgagccgcaagcgcatcacgaatggcattaaagctacctacgatggattcccctaaaacgataatagtaagaagggcatagcgctctacaatatgatgaggatgccacggcgtaggagaatatttttctgcatagataggaacaaataactcgaccacaaccagaagtaaaaataaaggaattgaaagagcatgagcaaagttagcaacaagccaaccaatttgtaccaatacgatacctatggcataacgatacgctgtaattcgccgttcagggtcatgttttgcggctctcagccactgggtaactaaagccaaacgcataatcacatagccgacaataatgatgtcaaaatcctggctatggaacacatcaggaatacctgcggccatgaccaatgaccctacaatctgtacaaaggtaagacaccgatacaaagcatcatcgttatcgtaagccgaagcaaaccatgaaaaattcatccatgcccaccacagcgcaaaaaataccatcagataacttggtaatgcatgccatatatgattttcaataattgcatgatgtagctgctgaccagctgttgcaatcgcgaccacaaaaattaaatcgaataataattcaaggggagttgctgctctatgcggctgttctggatctcttggagataggggcctcaaacttaattttttctgtttttcttgagtagtcataaaataacgttctcgaataaattgccaacacgttaacactttaatattaacgccccgaacacgcattaaaaattatctagccttactgtctattatttactcacaaataaactatatttcatttttgtgacaattctttatcaagaccttaagcttaattctttatcatagctcacgtttttgttcttgtttggaatatgaatgtctttagaaacactcaaccttagcttattccatgtcattaatggggctcaggatgcgagtcaatttatcattcgtcttgctatcttttttgctaatgatctcctctatattcttttattcatacttacatttttatggttttatggcgatcaagatttaaaaaatagggtcattaaatctgtctttctaacctgtgtatcgcttttagtcggttacgttatttctctgttttaccatcacccaagaccgtttgtgatgggtgtgggcaccacctttattgaacatgcgccaacagcgtcttttccaagtaatcatatgctaatttttagcaccattgccctgtcttatttatttgcccagcgcaaaatgattggaattattcttttatttttgtcatttgtggtggcgtggtcacgtatttatttaggtgtgcatttccctttagacatgttaggggcttttattgtcgcactactagtcaatacagcaggttattacttctggaatgcttacggtacaagtttgacggcattctgtattcatctttatcaaattatatgcaaaccacttttagaccgcggtttgattaaataacctctagagctttttttgtagtaaaaccaccacatgaagttcagttgcgtaatacaaaaaaatctgccattctatatggacattggatatgttttatccaaaacagaatttagtttgacaaggggagtagcctcctccaaacataacagcaatgttatgtgtcagatatcgtcaatacacttttattaaaaagtcggtatctgagcatcgtgaaattcatggtgtaggcaagaccttgatcatgttgatacagatgtttaattcatctggcaactggtcgaggtttttttatgcccaattgccggatgtatggaggatttatggaaacaatcggcaatttatggctgtacgtagcattctttggcatagtcattgtcatgcttctgattgactttttaggctttaagcaaaagcaaggtcaagatgtctcaattaagcaagctgcttactggagcgtggcgtgggtaagcgttgcagccttatttggtggtggtttatggctttacctacaacaaacagttggggtgaccttagcaaaccaaaaaaccatggaatactttgcaggttacttactcgaaaagtccctcgcaattgacaacgttttcgtctggttaatgattttcgcagcgtttgctataccggctgcgctacaacgtaaaattttgctctacggcgtattaggcgcaatcgtattgcgtaccctctttatttttattggtgcatggttcgttcaagagttttcttgggtactttatatcttcggcgcgttcttggtatatacaggctttaagttcttaaaaggccaagaagaagaaaccaacattgaagatatcaagcttttaaaatggttacgtaaccatatgcgtattacaccgcagcttgaaggtgacaaattttttgtacgccaaaacggtttattatgggcaacgccgttatttctagttttgattttggttgaagcttcagacgtgattttcgccgtagattctattcctgctattttcgcggtaactagcgacccgtttattgttttaacggcgaacttaatggcaattttaggtttacgcgcaatgttctttttgcttgctggcgctgcgactaaattgcattacttaccatacggcttaggcatcatcttattgttcattggtgcgaaaatgttgttgcttgatgtattccacatgccaatctggatctcgttaagctttatcgtcatagtgttagcaatcactgcttacctttctttacgacacaacaaaaagcaattgcagtcctaattcatcacaacaaggcatctacatgtaagatgccttgttatctaaatcttcaaaagagactgtactttaaaaaaacaggttaatattatatgccaacctaaaatttatctttcctaatcagaaacataatagataacagctaatcggtattttatgccgaatatatttattaaaatgtgtggagtctcatgcgttctaaaaaaattaatcttgtcgttgtcccgttattactcacggcatgtagccataatgatggtcctttagtacaagacatatataacaaccaatatgactgtgctcgcgactggaataatgaaacatgtaaacaagaaaatagctcaagtggacatggttctagctatgttggaagccgctatttagggcctgcgtattatcaaaataatcgggaagtttcttatcacggaaataccttacatccttacagcaatttgagtgtaggccgaccagttatctcaagtacggcgaaaagcgcgtcttcttcatccccaatacgtggggggtttggtcgtagtggtttctctttcggcggctaagtctttaggcattcacttaatatgaaaagaaaaatatttactccacgaccagactggcaagtggagcatcaaaatattggttttgattattttaatttaccttctctcgatggctcaatttactggtctgaaggggttgcgtatgagtttactcttaaacagattgaacaactcgaagatgcggcaaatgaactgcatcagatgtgtttatcggtagtaggagacctcattcaacgaggaaactatcctgcttactttcaaattccagaaacagccataaaccatattgaacattcatggaaacaaaatgctccgatgctgtatggccgctttgatttcgcttacgatgggcgaaatatcaaaatgctggaatataacgccgacacaccgactggcttacttgaagcttctgtcgcacagtggctgtggatagaacaagtctcgggcattgcaaaccgagaccagttcaatagtattcatgaagacctgattaaacgctggaagacaattttaccgcgtggtagccatgtgcattttgctgcctgtcaggaagctggaagggaagactggggcaatctcgagtatttgatggataccgcttaccaagctcatctacaagtttccgagctttctatggagaacataggttggaacgggcaagattttgttgatctccataatcagcccattcaaaacatatttaaactctatccatgggaatggatctgggaagaagcattttctcaatatatccatccacaaacacagtggattgaaccttgctggaaaatgctactttcaaataaagcgattctggttgagctttggaagtgttatcccaatcatccattattggtcgaaacccatacctatgactcgcaacaaagtttgtctggcaaatgggtgaaaaagccgattttggcaagggaaggggccaatattcgggttttacaagacggccatgaccaaggcgcggcttctggtagcttttattttgatgactatgacaaatatggttatgtcgtacagaaatgggtagacaccccattattttcaggacaactacctactcttggtttatggatggttggacatcaatgtgcaggcatgtctattcgtgaagattgttatgacatcattggtaatgatgcccactttgcagcacattattttgtcgagtaataagcgaatagagatttaaaaaagcactgtttaggtgtttttttattgtgccttcgacgcagtcaatcagtgcattttaaatatatagcgaataatcaatgttggcttttaaagctaaattagaacaaaaattcaaaaatataatgatttaactccatgtattttaaaatttttattctggcttactttcttaaaattcaatattggcaagctctttgcatctccaaaaaagaaaaaagcctagattttaggggctcgtcagagccctaattttttttaaggagtaatgcaatgaatgctattccaactttaactccccttgccatgccgtgtaacagcagttttgaagcaaaagattgggaaattttatcgagccattggtatcccgtcgcacgtattcaagatgtcttcaatgcgcctcaacgagtcacactactagacgtcaatatggccctctataaaacaaaaagtggtgaaattcatctagtccgagacatttgtccacatcgtggcgtgcctttaaccaaaggttgggtggatggtgaggagattgtttgtccttatcacggtctacgctataacaccgaagggaaatgtacccaaataccagctcagcccgaactgactaaaatttctgatcgtttttctctaatcaaatttccggttgtgcaaagatacggcctcatttggaccagtattcatggtcgtgatattgataaagccaatattcctgtattagatacttgggatgatgcagaacatcaagcgattttgccaccttttgtagatattggtggttctagtggtcgtcagcttgaagggtttatcgatgtcgctcattttgcatgggtgcatcacaacgcctttgcgaatcgtgataaccctgtcgtccctaaatatcacactgaacgtaccaactatggcttaaaaacggtctatatcagcaatgtcagtaattatccgcatgaactaaaacatctcgaaccagaaggctttttgtggaagcgtacttttgaggtttatccgccattttctgccgtgcttactgtcgattttccagaaagtgggatcttaaaaattttaaatgcctgttgtcctatctcaagtaataaaacccgtttatttgttccactcacacgtaactttgaccaaacaggtgatttagaaaaagtatatgcatttaatgcgcaaatttttgccgaagaccaagacatggtcgaatcacaaaaaccagaagaactaccgctcgatctaatgatggaagcacattttgaagcagaccgttcatcaacgacttatcgacggattttggctgaatggggactaagtaaacgttataccgtttaaatcttggctaactggggtacaatcaatcgaaaaaagtgaaaatatataggctttccatgtcattgatcgcaaataccaccgttgtgcgtggtcgttttttagatattcaacaaactgtctctgagccagctgatattccaaatcaagtacgttatttggaagatggtgtattgattagtgaacatggaaagatcaaatggtttggtgcatgggaagatgctcaacagcatctacctgctggagttgaggttcaacattatccagaacaattgattgtacccggctttattgatacccatattcactttccgcaaaccgaaatggtgggagcttacggcgaacaacttttaagctggcttaatacttatactttcccaactgaaatccagtttcaagacaaaacatatgcaagcgaaattgcccagttctttgttcaggaactcttaaaacacggtacaaccacggccctcgttttctgtacagttcatcccgtgtctgttgatgccttatttgaagccgcagagcgcgttcagatgcgtttaattgccggcaaggtacttatggaccgtaatgctccggaagcgctgtgtgacacgccagaaacggcttacagcgacactaaagcactcattgaaaaatggcatggtaagggccgtgctctgtatgcgattacgccacgatttgcgccgacttctacacctgagcaattagaaagagcagggcagttaaaacaagaatttccggatgtgtatgtccatacgcatttaagtgaaaacaaagatgaaattgcttgggtgaaatctttatttccggaacaagcgggctatttagatgtttatcaacattatggcctgactggtaagcgttctgtgtttgcgcattgcgttcacttagaagatgaagaatggcaatgtatgcatgatacgcaatcggctatcgcattttgcccaacttcaaacctgttcttaggcagtggtttatttccattgaaaaaaacttgggaaaaacaagtgaaagtaggcttagggacagatattggggctggcacatcgtttagcttactgcaaactgttaacgaggcttataaggttcagcaattacaaggtgataaactctcagcttatgaagcgctttatcatgcaaccctaggcggagcaaaagcactcgatttgcaggatcagttaggtaacttcaacgtcggtaaagaagcagactttgtggtactaaacttaaagccaacagcattacaggaacttcgccagtctaaatctaaatctgttgaagattcactgtttgcattattcactttaggtgatgaccgtaatattgaggcgacttatatttatggaaactgtgcttatcaaaaagaaacagccaaataaaaaaggcattgttaagtttttgttattatttggaatatgtgctattgcgttaaagcgtgatcgacatattccgcaaaatgataaaatttcacagccatcaaagggtgcatgaaacgtcattttgctttaaaattttaccattaactcagattttcgaggtgttgctggtcaacaccttttttattttttcttttatatcttgtaggaatctgccatgactgttgcaatgagcatcatgatttcaaccgaagaaattcaagcaaaagtcaaagagctcggcgagcaaatcaattctcactatgcaaatagtgacaaagaattggttctgattggtctacttcgtggttctgttattttcatggcagacttatgccgtacgattaccaaaccacatgaactcgactttatgacagtgtctagctatggcggcggtaccacttcaagtcgagacgttaaaatcttaaaagatcttgatggtgaaattcgtggtaaagacgtgcttgtggttgaagatattattgactcaggcaacaccttaagcaaagtcgtggaaatgttgcagactcgcgaaccaaattcgattcaattatgcacattagtgagtaaaccatctcgccgtgaaattgatttagaagttaaatttttaggttttgaagttgaagataaatttattgttggttatggcttagactacgaccagaaatatcgtcacttaccatttattggtgaaattggtctgtaaattttataaaaatggcaccgcaaggtgctatttttttatataaagcctgagctttgaacaaaaaagacacaaaaagtcgcaatctgctacagacaaaacagatcactctaccgcacgatagaatatgaagcaaaatcattaacttcatcaaaaaaacaactggagaacaaatatgtggtcacttattgttgctattgtggttggtttcttcgctggcttaatcgctcgagctttacacccaggtgatgataaagcaggttttattgttactactttaattggtattgcaggttcacttctagccacttatggcggtcgcttacttggtctttatggagaaaattcagcggcgggctttattgcttctgtcattggtgccgtcattattctctttatctataacctaattgcacgaaaaagctaagtagtaaatttaattttaaaaaagcaccgaacggtgctttttttaagtcattttataaacctaactctttccaaactgcctgaatttcttcggcagagcgcgctccgacgagtttaaatccgttagcaaaaatgagagtaggtgtgccattaaaacctaattttttccctaattccaagttacggtcaatcgggtttgtacagctcgcaaccgttggtttaacaccttgctcaattaattttttccatgaatatgattgattcggtgcacaccaaacttgtctagaaaccacaatagactgaggttttaaaggatagataaaagtgtaaatagtgacatctttaagcttgtcgagttcaggttcaagctgcttacaataagggcaatttggatcagaaaatactgctaaaacatgctgaccattacctttgactgttttaatggcatcttttaaaggcaactgtttccaatcaattgagttctgccctaaaaccagatctttagttaagttcttctggtcttttaaccgaattatagagcctacaaacatgtgctgcccatcttcaccaagataaataatttgctggtccagattagcactatatagtccaggcatttcggttttctgaatattactaattttcaaattaggatattgttttttaatattttcccgaacagtatctacattagcgaaactcaaacttgtagttaaactaaataacgccaatattcctaattttttaatcataaaaccgactcggaggcaggagagaagaacattttaatcagttccgttagtgaaaacagaactgattaccgagttataaccaaacttctactcagttacgccaatgtttcacgtggaacataaacaggttttaaggtattaatttctactgaaatatgcacaatttcatcatgaatcgataaagcatcacgaatctggtctgcatttaaagagatatcatcagtttcaagtgccaaaatacaagaaaatttaccttttgcgactttccagacatgaatatctgtaatttccacatgtttcggaaattcagctattacttcccgaatttcatcaactacaggatggtccatttcagcatctagaagagtttttcctgtctctttcattaagccaaaagaccactttgcaactaaaatagcacctaaaattcctaaaagtgcatctaaaaaatcccatccaaaatatttacctgcgaaaagcgctacaattgcaaaaacagaagtcactgcatctgcaaccacatgtaaaaacgcagctttttggtttaaatcatggtgatgatgcccatggctatgctcatgatggtgatggtgatggtgatggtgatggtgatggtgatggtgatggtgatggtgatggtgaccatcatcatgaagtaaccatgcgcaaatcaagttaataactaaacctaaaattgcaattggaatcgcctcattataaaaaatttcaactgggttaaataaacgttgaattgactgaaacgccataaaaatagccacaaccatcagcaaaattgcgctgctatagccagctaaaatctcaattttccaagttccaaagctaaaacggtgatcattggaataatggcgggctgcacgataggcaaagtaggctaaaccaagggccaacatatgtgaactcatatgccaaccgtcggccagtagtgccattgaattgaagaaccatccaccaaatacttccagtaccatcatggacgccgttaaaatggttgcaatcaaaatacgtttttgtgcaagtggatttccttcatcaaactgatgttgatgatgacgtgatacactataatcctgcataaaatttaaacccaatatactccctaccagtatattaaattgtacaagagaaaacagatgagtcacattggtcaggataaaaaaattgttaatcgtgtaaaacgactaaaagggcaaatcaacagcattgaaaatgcgatagaacaaccagaatcttcatgtatagatattttgcagcaagttgcagccataaaaggtgcaataaacggtttgatgagtgaattaatggaacagcacttacatcatcacgtacttaaaggcgcagaagtcgatcaaaatgagctagatgaatttttaaaagttttaaagagatacggctgagaaaagtactggatgacatagcactctacatcatccagttttttattattttccgatacagaacgaaccaaagattttgcctaataggtcatcggcactaaagtcacccgtaatttcacctaaagcattttgagcaagacgtagtgattcagcaacgagttcacctgcgttaaatacaacaagttgctcacgtgcctctgccaaatagagctgagtgcgcttcattgcgtctaaatgacgtgttctcgcaataaatgtatcttcctcagggtgaaatcctgcatgcgctgtaatcgcatctacgaggccttgtacgcccatctcttgttttgctgaaactgtgatatgacggaacccttgataatcgcttatttcggcagattgaccagttaaatcacatttattgccaattaacatgagacgacgcggttcaatatgttcagcaaagtattcttgagccagttttaaggggtcatcgccttgatttaaatcgtagaccaataacaacaaatcggcctgctcaatttctttgattgcacgacgaatgccttctttctcgactacatctcccgtttcacgaagacccgcagtatccgttaaggtgattggtaaaccatttaagctaattttttcatgtaaaacatcacgagttgtaccagcaatatcagtcacaattgcacgctcaacaccagcaagtgcatttaacaagctcgacttacccgcgtttggtttacccgcaataacaacctgtagaccttcacggagtaattgcccttgtcgtgcagaggtttgaacggcatgtacagattgttgaacatcttccaacaaagctaaaattttgccatcagccaaaaaatcaatttcttcttctggaaaatcaatcgcagcttctacgtgcagacgtaaatgaatcagtttttctaaaactgtattaatttttgttgaaaaagcgccttgtaaagaacggactgccgaacgagccgcagcttgagaggtcgcatcaatcaaatcggcaattgcttcagcttgtaccaagtccattttgccattttcaaaagctcgcatggagaattccccagcttttgcagcaattgccccaagctcaaataaacggccaagtaaggcattttgaatgacaggaccaccgtggccttgaagttctacaacatcttcaccggtaaaagaatgtggatttggaaagcacaagacaatgccttcatccataatacttccatcagcatcataaaacttacggaaacccgccaaccgagcttcaggtaagtttttttgcgtcagtttttgagcaatatcataagccttaggtcccgataagcgaatcacgcccactccaccacgccctggtggcgttgcaattgcggcaattgtggtttgactatgcatattattcacctaaaaacctaaaatacagtcaaagaaaaatccgcctaagattaccatcttaagcggattgattcagcaaaagttcaaggattaagatgccgattcagctttactgatacgacttttctcaacactcttgttaataaaccattgctgtaagattgtaatactgttgttcacaatccagtacaacacaagacccgcagggaagaacaacataaataccgtaaacataatcggcataatgcggaatactttcgcctgcattggatcagctggttgcgggttcaacatttgctgagcaaacattgtcgcacccataattaatggcaagatgaaccatgggtccatcgcagacaaatcgtgaatccagcctaaccacggtgcatgacgtaattccacactttccatgagtacccagtacaaagcaaggaaaattggcatttgtagcaataacggtaaacaaccagaaagcgggttaacctgttcacgtttgtaaagcgccatcatttcttgcgagaagcgcatacggtcttcaccgaattcttctttcatgcgttgcatttctggtgcaatcacacgcattttcgccatagaacgataactttttgaagataaaggccataaaatcatcttcaccataatggtaagtaagataattgaccatccccagttgcctacaatgctatggaagaattgaagacctaggaacaataacttcgcaattggccataaccaaccatagtcaacagtctggtttaaacctaccgctaaatcttttaattcagattgtacttttggacctgaataaagcttcgcatcgacttccattgaagtacccgccggaacattaattactggcgaagtaaagccaataatattcatatgatccgcagactgacgagattcaagtttagcgacataaggctgaccatttgcttgagtcagtttaaggtttcctggaatccaagcacttacaaagtaatgctgaaccattgcaacccaaccgcctttagcttcggtattgagtttttcttcagagaaattcgcaaacttaagtttgttgtagtgagcatccggagtaccccatgcaccacctaagaacgtacctaaagtgaaaataccctgagaagacttacctggatcttccgaattatcacgtttcaactgtccaaacatctgaccttgccagttttgttggctacggttaacaacttgatgtttgacaacaattggatattgaccttgagtaaatgtaaaagttttaataatttcaacgccttctggtgtcttaaacaccataggaactgttaaaactttctcagaatgtccactttgatcttgtacccctttagcatcagctaaagtatatgatgttttttcaacagcatataatgggcgaccaccacgactgctatctggtccattcaaaccaattaagccagactgagcaacataagtacgcttggcatcattttcaagcataacaaatggttgattactgtctttgctcttgtcgtgagagagtaattcaatacgaacaatatcaccaccttttggattgatccaaagatgataaaggtcagtttgtactgaaataagctgttgattcacaggtgcagttgcatctgtggtttgtgactgcgcaatatttgcttgtggcacatcggaagccactgttgcagttttagcatttggcaaatcagcagatacttcatgtgaacttacagccgccgcttgttgttgcggtgcagttgcagcatttccataatctttttgccaagccaaaatgagcaaatatgcggtgacaaacatggccccgagaattgcaaacctggcccattgttgcatatctattaccccaaatggttagagagattttgcttcattaaacgatcacgaaagggtacagcaacatgatgcgtttgagaatctatttgatgaaacgaaataaaacgaattgctttaggcggtaccggatcgtatccagagcctccccacggatgacaacgacaaatacgtttagaagataaccaaacgcctttgattgcaccatgagtttgtaatgcttctagcgcatattgggaacaagttgggatataacgacaacggggtccaagaagcggactaatcgcaatttgatacagtcgaatgaaccaacgcaaaatacgaaccattggtcatctcttaattctgcgaggttgggacaactttagaatgttttttcgctaagcgttgtaatttttgccaagcaaaatctaattgttgatatagctcagcattcgtaatcgtttctataccaactttaggcatcacaacaacatctatgtctgactcaaatttcggctgatgtagacgaaagctctcacgagcaagacgttttattcgatttctttcatgcgcacgacgcacttttttcttagcaacaacaatacccaaacggctgttaggctgttcggttaattttgcaagaaataaaaaatggggttgatgcactttaaaaagcgcaccatcaaatacacttttataatctgcagcacagcgtatacgaagatctgtgctaaaactgtaaagtgccatcacacccaagtctggtcagcgtaacagtattaaacagttaagctatgacgaccttttgcacgacgacgagctaatacttgacgaccagctttagttgccatacgagcacggaaaccatgaacgcgtttacgctttaattcagatggttggaaagtacgtttcatatcgaaactcccaaaaatgatctttctataaaggtccgcgattttattgtgcaatgtttacgctgtcaatgaaaaaccgtgaaagttttgtatttaagtcaaatttttaactttttatcttctctttatatttagcctattttcttatttaaaag
